(19) United States
(12) Patent Application Publication
(10) Pub. No.: US 2021/0277092 A1
(43) Pub. Date: Sep. 9, 2021

(54) HUMAN MONOCLONAL ANTIBODIES TO SEVERE ACUTE RESPIRATORY SYNDROME CORONAVIRUS 2 (SARS-CoV-2)

(71) Applicant: Vanderbilt University, Nashville, TN (US)

(72) Inventors: James E. Crowe, JR., Nashville, TN (US); Seth Zost, Nashville, TN (US); Robert Carnahan, Nashville, TN (US); Pavlo Gilchuk, Nashville, TN (US)

(73) Assignee: Vanderbilt University, Nashville, TN (US)

(21) Appl. No.: 17/173,417

(22) Filed: Feb. 11, 2021

Related U.S. Application Data
(60) Provisional application No. 62/972,877, filed on Feb. 11, 2020.
(60) Provisional application No. 62/994,627, filed on Mar. 25, 2020.

(51) Int. Cl. C07K 16/10; G01N 33/569; G01N 33/563

(52) U.S. Cl. CPC C07K 16/10; G01N 33/56983; G01N 33/563; G01N 2333/165; A61K 2039/545; C07K 2317/565; C07K 2317/24; C07K 2317/31; G01N 2800/26

(57) ABSTRACT

The present disclosure is directed to antibodies binding to and neutralizing the coronavirus designated SARS-CoV-2 and methods for use thereof.

### PRIORITY

[0001] This application claims benefit of priority to U.S. Provisional Application Ser. No. 62/972,877, filed Feb. 11, 2020 and 62/994,627, filed Mar. 25, 2020, the entire contents of both applications being hereby incorporated by reference.

### FEDERAL FUNDING DISCLOSURE

[0002] This invention was made with government support under HR0011-18-2-0001 awarded by the Defense Advanced Research Projects Agency (DARPA) and HHS Contract 75N93019C00074 awarded by the National Institutes of Allergy and Infection Disease/National Institutes of Health. The government has certain rights in the invention.

### INCORPORATION OF SEQUENCE LISTING

[0003] The sequence listing that is contained in the file named “VBLTP0307US1_ST25.txt”, which is 4,165 KB (as measured in Microsoft Windows®) and was created on Feb. 10, 2021, is filed herewith by electronic submission and is incorporated by reference herein.

### BACKGROUND

### 1. Field of the Disclosure

[0004] The present disclosure relates generally to the fields of medicine, infectious disease, and immunology. More particular, the disclosure relates to human antibodies binding to a novel coronavirus designated SARS-CoV-2 and methods of use therefor.

### 2. Background

[0005] An epidemic of a novel coronavirus (SARS-CoV-2) affected mainland China, along with cases in 179 other countries and territories. It was identified in Wuhan, the capital of China's Hubei province, after 41 people developed pneumonia without a clear cause. The virus, which causes acute respiratory disease designated coronavirus disease 2019 (COVID-19), is capable of spreading from person to person. The incubation period (time from exposure to onset of symptoms) ranges from 0 to 24 days, with a mean of 3-5 days, but it may be contagious during this period and after recovery. Symptoms include fever, coughing and breathing difficulties. An estimate of the death rate in February 2020 was 2% of confirmed cases, higher among those who require admission to hospital.

[0006] As of 10 Feb. 2020, 40,627 cases have been confirmed (6,495 serious), including in every province-level division of China. A larger number of people may have been infected, but not detected (especially mild cases). As of 10 Feb. 2020, 910 deaths have been attributed to the virus since the first confirmed death on 9 January, with 3,323 recoveries. The first local transmission outside China occurred in Vietnam between family members, while the first international transmission not involving family occurred in Germany on 22 January. The first death outside China was in the Philippines, where a man from Wuhan died on 1 February. As of 10 Feb. 2020, the death toll from this virus had surpassed the global SARS outbreak in 2003.

[0007] As of early February 2020, there is no licensed vaccine and no specific treatment, although several vaccine approaches and antivirals are being investigated. The outbreak has been declared a Public Health Emergency of International Concern (PHEIC) by the World Health Organization (WHO), based on the possible effects the virus could have if it spreads to countries with weaker healthcare systems. Thus, there is an urgent need to explore the biology and pathology of SARS-CoV-2 and well as the human immune response to this virus.

### SUMMARY

[0008] Thus, in accordance with the present disclosure, there is provided a method of detecting COVID-19 infection with SARS-CoV-2 in a subject comprising (a) contacting a sample from said subject with an antibody or antibody fragment having clone-paired heavy and light chain CDR sequences from Tables 3 and 4, respectively; and (b) detecting SARS-CoV-2 in said sample by binding of said antibody or antibody fragment to a SARS-CoV-2 antigen in said sample. The sample may be a body fluid, such as blood, sputum, tears, saliva, mucous or serum, semen, cervical or vaginal secretions, amniotic fluid, placental tissues, urine, exudate, transudate, tissue scrapings or feces. Detection may comprise ELISA, RIA, lateral flow assay or western blot. The method may further comprise performing steps (a) and (b) a second time and determining a change in SARS-CoV-2 antigen levels as compared to the first assay. The antibody or antibody fragment may be encoded by clone-paired variable sequences as set forth in Table 1. The antibody or antibody fragment may be encoded by light and heavy chain variable sequences having at least 70%, 80%, 90% or 95% identity to clone-paired variable sequences as set forth in Table 1, or by light and heavy chain variable sequences having 100% identity to clone-paired sequences as set forth in Table 1. The antibody or antibody fragment may comprise light and heavy chain variable sequences according to clone-paired sequences from Table 2, or light and heavy chain variable sequences having at least 70%, 80%, 90% or 95% identity to clone-paired sequences from Table 2. The antibody or antibody fragment may bind to a SARS-CoV-2 surface spike protein. The antibody fragment may be a recombinant scFv (single chain fragment variable) antibody, Fab fragment, F(ab′)₂ fragment, or Fv fragment. Alternatively, any of the embodiments in this paragraph may employ an antibody having a sequence or encoded by a sequence found in SEQ ID NOS: 1-9151.

[0009] In another embodiment, there is provided a method of treating a subject infected with SARS-CoV-2 or reducing the likelihood of infection of a subject at risk of contracting SARS-CoV-2, comprising delivering to said subject an antibody or antibody fragment having clone-paired heavy and light chain CDR sequences from Tables 3 and 4, respectively. The antibody or antibody fragment may be encoded by light and heavy chain variable sequences having at least 70%, 80%, 90% or 95% identity to clone-paired variable sequences as set forth in Table 1, or by light and heavy chain variable sequences having 100% identity to clone-paired sequences as set forth in Table 1. The antibody or antibody fragment may comprise light and heavy chain variable sequences according to clone-paired sequences from Table 2, or light and heavy chain variable sequences having at least 70%, 80%, 90% or 95% identity to clone-paired sequences from Table 2. The antibody fragment may be a recombinant scFv (single chain fragment variable) antibody, Fab fragment, F(ab′)₂ fragment, or Fv fragment. The antibody may be a chimeric antibody or a bispecific antibody. The antibody may be an IgG, or a recombinant IgG antibody or antibody fragment comprising an Fc portion mutated to alter (eliminate or enhance) FcR interactions, to increase half-life and/or increase therapeutic efficacy, such as a LALA, LALA PG, N297, GASD/ALIE, DHS, YTE or LS mutation or glycan modified to alter (eliminate or enhance) FcR interactions such as enzymatic or chemical addition or removal of glycans or expression in a cell line engineered with a defined glycosylating pattern. The antibody or antibody fragment may bind to a SARS-CoV-2 antigen such as a surface spike protein. The antibody or antibody fragment may be administered prior to infection or after infection. The subject may be of age 60 or older, may be immunocompromised, or may suffer from a respiratory and/or cardiovascular disorder. Delivering may comprise antibody or antibody fragment administration, or genetic delivery with an RNA or DNA sequence or vector encoding the antibody or antibody fragment. Alternatively, any of the embodiments in this paragraph may employ an antibody having a sequence or encoded by a sequence found in SEQ ID NOS: 1-9151.

[0010] In yet another embodiment, there is provided a monoclonal antibody, wherein the antibody or antibody fragment is characterized by clone-paired heavy and light chain CDR sequences from Tables 3 and 4, respectively. The antibody or antibody fragment may be encoded by light and heavy chain variable sequences having at least 70%, 80%, 90% or 95% identity to clone-paired variable sequences as set forth in Table 1, or by light and heavy chain variable sequences having 100% identity to clone-paired sequences as set forth in Table 1. The antibody or antibody fragment may comprise light and heavy chain variable sequences according to clone-paired sequences from Table 2, or light and heavy chain variable sequences having at least 70%, 80%, 90% or 95% identity to clone-paired sequences from Table 2. The antibody fragment may be a recombinant scFv (single chain fragment variable) antibody, Fab fragment, F(ab′)2 fragment, or Fv fragment. The antibody may be a chimeric antibody, is bispecific antibody, or is an intrabody. The antibody may be an IgG, or a recombinant IgG antibody or antibody fragment comprising an Fc portion mutated to alter (eliminate or enhance) FcR interactions, to increase half-life and/or increase therapeutic efficacy, such as a LALA, LALA PG, N297, GASD/ALIE, DHS, YTE or LS mutation or glycan modified to alter (eliminate or enhance) FcR interactions such as enzymatic or chemical addition or removal of glycans or expression in a cell line engineered with a defined glycosylating pattern. The antibody or antibody fragment may bind to a SARS-CoV-2 surface spike protein. Alternatively, any of the embodiments in this paragraph may employ an antibody having a sequence or encoded by a sequence found in SEQ ID NOS: 1-9151.

[0011] A hybridoma or engineered cell encoding an antibody or antibody fragment wherein the antibody or antibody fragment is characterized by clone-paired heavy and light chain CDR sequences from Tables 3 and 4, respectively. The antibody or antibody fragment may be encoded by light and heavy chain variable sequences having at least 70%, 80%, 90% or 95% identity to clone-paired variable sequences as set forth in Table 1, or by light and heavy chain variable sequences having 100% identity to clone-paired sequences as set forth in Table 1. The antibody or antibody fragment may comprise light and heavy chain variable sequences according to clone-paired sequences from Table 2, or light and heavy chain variable sequences having at least 70%, 80%, 90% or 95% identity to clone-paired sequences from Table 2. The antibody fragment may be a recombinant scFv (single chain fragment variable) antibody, Fab fragment, F(ab′)₂ fragment, or Fv fragment. The antibody may be a chimeric antibody, a bispecific antibody, or an intrabody. The antibody may bean IgG, or a recombinant IgG antibody or antibody fragment comprising an Fc portion mutated to alter (eliminate or enhance) FcR interactions, to increase half-life and/or increase therapeutic efficacy, such as a LALA, LALA PG, N297, GASD/ALIE, DHS, YTE or LS mutation or glycan modified to alter (eliminate or enhance) FcR interactions such as enzymatic or chemical addition or removal of glycans or expression in a cell line engineered with a defined glycosylating pattern. The antibody or antibody fragment may bind to a SARS-CoV-2 surface spike protein. Alternatively, any of the embodiments in this paragraph may employ an antibody having a sequence or encoded by a sequence found in SEQ ID NOS: 1-9151.

[0012] In still yet another embodiment, there is provided a vaccine formulation comprising one or more antibodies or antibody fragments characterized by clone-paired heavy and light chain CDR sequences from Tables 3 and 4, respectively. The at least one of said antibodies or antibody fragments may be encoded by light and heavy chain variable sequences according to clone-paired sequences from Table 1, by light and heavy chain variable sequences having at least 70%, 80%, or 90% identity to clone-paired sequences from Table 1, or by light and heavy chain variable sequences having at least 95% identity to clone-paired sequences from Table 1. The at least one of said antibodies or antibody fragments may comprise light and heavy chain variable sequences according to clone-paired sequences from Table 2, or may comprise light and heavy chain variable sequences having at least 70%, 80$, 90% or 95% identity to clone-paired sequences from Table 2. The at least one of said antibody fragments is a recombinant scFv (single chain fragment variable) antibody, Fab fragment, F(ab′)₂ fragment, or Fv fragment. The at least one of said antibodies may a chimeric antibody, a bispecific antibody or an intrabody. The antibody may be an IgG, or a recombinant IgG antibody or antibody fragment comprising an Fc portion mutated to alter (eliminate or enhance) FcR interactions, to increase half-life and/or increase therapeutic efficacy, such as a LALA, LALA PG, N297, GASD/ALIE, DHS YTE or LS mutation or glycan modified to alter (eliminate or enhance) FcR interactions such as enzymatic or chemical addition or removal of glycans or expression in a cell line engineered with a defined glycosylating pattern. The antibody or antibody fragment may bind to a SARS-CoV-2 antigen surface spike protein. Alternatively, any of the embodiments in this paragraph may employ an antibody having a sequence or encoded by a sequence found in SEQ ID NOS: 1-9151.

[0013] In a further embodiment, there is provided a vaccine formulation comprising one or more expression vectors encoding a first antibody or antibody fragment as described herein. The expression vector(s) may be Sindbis virus or VEE vector(s). The vaccine may be formulated for delivery by needle injection, jet injection, or electroporation. The vaccine formulation may further comprise one or more expression vectors encoding for a second antibody or antibody fragment, such as a distinct antibody or antibody fragment as described herein.

[0014] In yet a further embodiment, there is provided a method of protecting the health of a subject of age 60 or older, an immunocompromised, subject or a subject suffering from a respiratory and/or cardiovascular disorder that is infected with or at risk of infection with SARS-CoV-2 comprising delivering to said subject an antibody or antibody fragment having clone-paired heavy and light chain CDR sequences from Tables 3 and 4, respectively. The antibody or antibody fragment may be encoded by light and heavy chain variable sequences having at least 70%, 80%, 90% or 95% identity to clone-paired variable sequences as set forth in Table 1, or by light and heavy chain variable sequences having 100% identity to clone-paired sequences as set forth in Table 1. The antibody or antibody fragment may comprise light and heavy chain variable sequences according to clone-paired sequences from Table 2, or light and heavy chain variable sequences having at least 70%, 80%, 90% or 95% identity to clone-paired sequences from Table 2. The antibody fragment may be a recombinant scFv (single chain fragment variable) antibody, Fab fragment, F(ab′)₂ fragment, or Fv fragment. The antibody may an IgG, or a recombinant IgG antibody or antibody fragment comprising an Fc portion mutated to alter (eliminate or enhance) FcR interactions, to increase half-life and/or increase therapeutic efficacy, such as a LALA, LALA PG, N297, GASD/ALIE, DHS, YTE or LS mutation or glycan modified to alter (eliminate or enhance) FcR interactions such as enzymatic or chemical addition or removal of glycans or expression in a cell line engineered with a defined glycosylating pattern. The antibody may be a chimeric antibody or a bispecific antibody. The said antibody or antibody fragment may be administered prior to infection or after infection. The antibody or antibody fragment may bind to a SARS-CoV-2 antigen such as a surface spike protein. Delivering may comprise antibody or antibody fragment administration, or genetic delivery with an RNA or DNA sequence or vector encoding the antibody or antibody fragment. The antibody or antibody fragment may improve the subject's respiration as compared to an untreated control and/or may reduce viral load as compared to an untreated control. Alternatively, any of the embodiments in this paragraph may employ an antibody having a sequence or encoded by a sequence found in SEQ ID NOS: 1-9151.

[0015] In still yet a further embodiment, there is provided a method of determining the antigenic integrity, correct conformation and/or correct sequence of a SARS-CoV-2 surface spike protein comprising (a) contacting a sample comprising said antigen with a first antibody or antibody fragment having clone-paired heavy and light chain CDR sequences from Tables 3 and 4, respectively; and (b) determining antigenic integrity, correct conformation and/or correct sequence of said antigen by detectable binding of said first antibody or antibody fragment to said antigen. The sample may comprise recombinantly produced antigen or a vaccine formulation or vaccine production batch. Detection may comprise ELISA, RIA, western blot, a biosensor using surface plasmon resonance or biolayer interferometry, or flow cytometric staining. The first antibody or antibody fragment may be encoded by clone-paired variable sequences as set forth in Table 1, by light and heavy chain variable sequences having at least 70%, 80%, or 90% identity to clone-paired variable sequences as set forth in Table 1, or by light and heavy chain variable sequences having at least 95% identity to clone-paired sequences as set forth in Table 1. The first antibody or antibody fragment may comprise light and heavy chain variable sequences according to clone-paired sequences from Table 2, may comprise light and heavy chain variable sequences having at least 70%, 80% or 90% identity to clone-paired sequences from Table 2, or may comprise light and heavy chain variable sequences having at least 95% identity to clone-paired sequences from Table 2. The first antibody fragment may be a recombinant scFv (single chain fragment variable) antibody, Fab fragment, F(ab′)2 fragment, or Fv fragment. The method may further comprise performing steps (a) and (b) a second time to determine the antigenic stability of the antigen over time. Alternatively, any of the embodiments in this paragraph may employ an antibody having a sequence or encoded by a sequence found in SEQ ID NOS: 1-9151.

[0016] The method may further comprise (c) contacting a sample comprising said antigen with a second antibody or antibody fragment having clone-paired heavy and light chain CDR sequences from Tables 3 and 4, respectively; and (d) determining antigenic integrity of said antigen by detectable binding of said second antibody or antibody fragment to said antigen. The second antibody or antibody fragment may be encoded by clone-paired variable sequences as set forth in Table 1, by light and heavy chain variable sequences having at least 70%, 80%, or 90% identity to clone-paired variable sequences as set forth in Table 1, or by light and heavy chain variable sequences having at least 95% identity to clone-paired sequences as set forth in Table 1. The second antibody or antibody fragment may comprise light and heavy chain variable sequences according to clone-paired sequences from Table 2, may comprise light and heavy chain variable sequences having at least 70%, 80% or 90% identity to clone-paired sequences from Table 2, or may comprise light and heavy chain variable sequences having at least 95% identity to clone-paired sequences from Table 2. The second first antibody fragment may be a recombinant scFv (single chain fragment variable) antibody, Fab fragment, F(ab′)2 fragment, or Fv fragment. The method may further comprise performing steps (c) and (d) a second time to determine the antigenic stability of the antigen over time. Alternatively, any of the embodiments in this paragraph may employ an antibody having a sequence or encoded by a sequence found in SEQ ID NOS: 1-9151.

[0017] Also provided is human monoclonal antibody or antibody fragment, or hybridoma or engineered cell producing the same, wherein said antibody binds to a SARS-CoV-2 antigen surface spike protein.

[0018] The use of the word “a” or “an” when used in conjunction with the term “comprising” in the claims and/or the specification may mean “one,” but it is also consistent with the meaning of “one or more,” “at least one,” and “one or more than one.” The word “about” means plus or minus 5% of the stated number.

[0019] It is contemplated that any method or composition described herein can be implemented with respect to any other method or composition described herein. Other objects, features and advantages of the present disclosure will become apparent from the following detailed description. It should be understood, however, that the detailed description and the specific examples, while indicating specific embodiments of the disclosure, are given by way of illustration only, since various changes and modifications within the spirit and scope of the disclosure will become apparent to those skilled in the art from this detailed description.

### DESCRIPTION OF ILLUSTRATIVE EMBODIMENTS

[0020] As discussed above, SARS-CoV-2 is a major health concern with active cases increasing daily. Therefore, understanding the biology of this virus and the nature and extent of the human immune response to the virus is of paramount importance. The inventors have identified the sequences of human antibodies to SARS-CoV-2. Those sequences and uses for such antibodies are disclosed herein.

[0021] These and other aspects of the disclosure are described in detail below.

### I. CORONAVIRUS 2019 (SARS-CoV-2)

[0022] SARS-CoV-2 is a contagious virus that causes the acute respiratory disease designated coronavirus disease 2019 (COVID-19), a respiratory infection. It is the cause of the ongoing 2019-20 coronavirus outbreak, a global health emergency. Genomic sequencing has shown that it is a positive-sense, single-stranded RNA coronavirus.

[0023] During the ongoing outbreak, the virus has often been referred to in common parlance as “the coronavirus”, “the new coronavirus” and “the Wuhan coronavirus”, while the WHO recommends the designation “SARS-CoV-2”. The International Committee on Taxonomy of Viruses (ICTV) announced that the official name for the virus is SARS-CoV-2.

[0024] Many early cases were linked to a large seafood and animal market in the Chinese city of Wuhan, and the virus is thought to have a zoonotic origin. Comparisons of the genetic sequences of this virus and other virus samples have shown similarities to SARS-CoV (79.5%) and bat coronaviruses (96%). This finding makes an ultimate origin in bats likely, although an intermediate host, such as a pangolin, cannot be ruled out. The virus could be a recombinant virus formed from two or more coronaviruses.

[0025] Human-to-human transmission of the virus has been confirmed. Coronaviruses are primarily spread through close contact, in particular through respiratory droplets from coughs and sneezes within a range of about 6 feet (1.8 m). Viral RNA has also been found in stool samples from infected patients. It is possible that the virus can be infectious even during the incubation period.

[0026] Animals sold for food were originally suspected to be the reservoir or intermediary hosts of SARS-CoV-2 because many of the first individuals found to be infected by the virus were workers at the Huanan Seafood Market. A market selling live animals for food was also blamed in the SARS outbreak in 2003; such markets are considered to be incubators for novel pathogens. The outbreak has prompted a temporary ban on the trade and consumption of wild animals in China. However, some researchers have suggested that the Huanan Seafood Market may not be the original source of viral transmission to humans.

[0027] With a sufficient number of sequenced genomes, it is possible to reconstruct a phylogenetic tree of the mutation history of a family of viruses. Research into the origin of the 2003 SARS outbreak has resulted in the discovery of many SARS-like bat coronaviruses, most originating in the Rhinolophus genus of horseshoe bats. SARS-CoV-2 falls into this category of SARS-related coronaviruses. Two genome sequences from Rhinolophus sinicus published in 2015 and 2017 show a resemblance of 80% to SARS-CoV-2. A third virus genome from Rhinolophus affinis, “RaTG13” collected in Yunnan province, has a 96% resemblance to SARS-CoV-2.^{[28][29]} For comparison, this amount of variation among viruses is similar to the amount of mutation observed over ten years in the H3N2 human influenza virus strain.

[0028] SARS-CoV-2 belongs to the broad family of viruses known as coronaviruses; “nCoV” is the standard term used to refer to novel coronaviruses until the choice of a more specific designation. It is a positive-sense single-stranded RNA (+ssRNA) virus. Other coronaviruses are capable of causing illnesses ranging from the common cold to more severe diseases such as Middle East respiratory syndrome (MERS) and Severe acute respiratory syndrome (SARS). It is the seventh known coronavirus to infect people, after 229E, NL63, OC43, HKU1, MERS-CoV, and SARS-CoV.

[0029] Like SARS-CoV, SARS-CoV-2 is a member of the subgenus Sarbecovirus (Beta-CoV lineage B). Its RNA sequence is approximately 30,000 bases in length. By 12 January, five genomes of SARS-CoV-2 had been isolated from Wuhan and reported by the Chinese Center for Disease Control and Prevention (CCDC) and other institutions; the number of genomes increased to 28 by 26 January. Except for the earliest GenBank genome, the genomes are under an embargo at GISAID. A phylogenic analysis for the samples is available through Nextstrain.

[0030] Publication of the SARS-CoV-2 genome led to several protein modeling experiments on the receptor binding protein (RBD) of the spike (S) protein of the virus. Results suggest that the S protein retains sufficient affinity to the Angiotensin converting enzyme 2 (ACE2) receptor to use it as a mechanism of cell entry. On 22 January, a group in China working with the full virus and a group in the U.S. working with reverse genetics independently and experimentally demonstrated human ACE2 as the receptor for SARS-CoV-2.

[0031] To look for potential protease inhibitors, the viral 3C-like protease M(pro) from the ORF1a polyprotein has also been modeled for drug docking experiments. Innophore has produced two computational models based on SARS protease, and the Chinese Academy of Sciences has produced an unpublished experimental structure of a recombinant SARS-CoV-2 protease. In addition, researchers at the University of Michigan have modeled the structures of all mature peptides in the SARS-CoV-2 genome using I-TASSER.

[0032] The first known human infection occurred in early December 2019. An outbreak of SARS-CoV-2 was first detected in Wuhan, China, in mid-December 2019, likely originating from a single infected animal. The virus subsequently spread to all provinces of China and to more than two dozen other countries in Asia, Europe, North America, and Oceania. Human-to-human spread of the virus has been confirmed in all of these regions. On 30 Jan. 2020, SARS-CoV-2 was designated a global health emergency by the WHO.

[0033] As of 10 Feb. 2020 (17:15 UTC), there were 40,645 confirmed cases of infection, of which 40,196 were within mainland China. Initially, nearly all cases outside China occurred in people who either traveled from Wuhan, or were in direct contact with someone who traveled from the area. Later, spread from travelers to other countries resulted in trasmission in many countires in the world. While the proportion of infections that result in confirmed infection or progress to diagnosable SARS-CoV-2 acute respiratory disease remains unclear, the total number of deaths attributed to the virus was over 19,000 as of 25 Mar. 2020.

[0034] The basic reproduction number (R-zero) of the virus has been estimated to be between 1.4 and 3.9. This means that, when unchecked, the virus typically results in 1.4 to 3.9 new cases per established infection. It has been established that the virus is able to transmit along a chain of at least four people.

[0035] In January 2020, multiple organizations and institutions began work on creating vaccines for SARS-CoV-2 based on the published genome. In China, the Chinese Center for Disease Control and Prevention is developing a vaccine against the novel coronavirus. The University of Hong Kong has also announced that a vaccine is under development there. Shanghai East Hospital is also developing a vaccine in partnership with the biotechnology company Stemirna Therapeutics.

[0036] Elsewhere, three vaccine projects are being supported by the Coalition for Epidemic Preparedness Innovations (CEPI), including projects by the biotechnology companies Moderna and Inovio Pharmaceuticals and another by the University of Queensland. The United States National Institutes of Health (NIH) is cooperating with Moderna to create an RNA vaccine matching a spike of the coronavirus surface; Phase I clinical trials began in March 2020. Inovio Pharmaceuticals is developing a DNA-based vaccination and collaborating with a Chinese firm in order to speed its acceptance by regulatory authorities in China, hoping to perform human trials of the vaccine in the summer of 2020. In Australia, the University of Queensland is investigating the potential of a molecular clamp vaccine that would genetically modify viral proteins to make them mimic the coronavirus and stimulate an immune reaction.

[0037] In an independent project, the Public Health Agency of Canada has granted permission to the International Vaccine Centre (VIDO-InterVac) at the University of Saskatchewan to begin work on a vaccine. VIDO-InterVac aims to start production and animal testing in March 2020, and human testing in 2021. The Imperial College Faculty of Medicine in London is now at the stage of testing a vaccine on animals.

[0038] COVID-19 acute respiratory disease is a viral respiratory disease caused by SARS-CoV-2. It was first detected during the 2019-20 Wuhan coronavirus outbreak. Symptoms may include fever, dry cough, and shortness of breath. There is no specific licensed treatment available as of March 2020, with efforts focused on lessening symptoms and supporting functioning.

[0039] Those infected may either be asymptomatic or have mild to severe symptoms, like fever, cough, shortness of breath. Diarrhoea or upper respiratory symptoms (e.g., sneezing, runny nose, sore throat) are less frequent. Cases of severe infection can progress to severe pneumonia, multi-organ failure, and death. The time from exposure to onset of symptoms is estimated at 2 to 10 days by the World Health Organization, and 2 to 14 days by the US Centers for Disease Control and Prevention (CDC).

[0040] Global health organizations have published preventive measures individuals can take to reduce the chances of SARS-CoV-2 infection. Recommendations are similar to those previously published for other coronaviruses and include: frequent washing of hands with soap and water; not touching the eyes, nose, or mouth with unwashed hands; and practicing good respiratory hygiene.

[0041] The WHO has published several testing protocols for SARS-CoV-2. Testing uses real time reverse transcription-polymerase chain reaction (rRT-PCR). The test can be done on respiratory or blood samples. Results are generally available within a few hours to days.

[0042] Research into potential treatments for the disease were initiated in January 2020. The Chinese Center for Disease Control and Prevention started testing existing pneumonia treatments in coronavirus-related pneumonia in late January. There has also been examination of the RNA polymerase inhibitor remdesivir, and interferon beta. In late January 2020, Chinese medical researchers expressed an intent to start clinical testing on remdesivir, chloroquine, and lopinavir/ritonavir, all of which seemed to have “fairly good inhibitory effects” on SARS-CoV-2 at the cellular level in exploratory research. On 5 Feb. 2020, China started patenting use of remdesivir for the disease.

[0043] Overall mortality and morbidity rates due to infection with SARS-CoV-2 are unknown, both because the case fatality rate may be changing over time in the current outbreak, and because the proportion of infections that progress to diagnosable disease remains unclear. However, preliminary research into SARS-CoV-2 acute respiratory disease has yielded case fatality rate numbers between 2% and 3%, and in January 2020 the WHO suggested that the case fatality rate was approximately 3%. An unreviewed Imperial College preprint study among 55 fatal cases noted that early estimates of mortality may be too high as asymptomatic infections are missed. They estimated a mean infection fatality ratio (the mortality among infected) ranging from 0.8% when including asymptomatic carriers to 18% when including only symptomatic cases from Hubei province.

[0044] Early data indicates that among the first 41 confirmed cases admitted to hospitals in Wuhan, 13 (32%) individuals required intensive care, and 6 (15%) individuals died. Of those who died, many were in unsound health to begin with, exhibiting conditions like hypertension, diabetes, or cardiovascular disease that impaired their immune systems. In early cases of SARS-CoV-2 acute respiratory disease that resulted in death, the median time of disease was found to be 14 days, with a total range from six to 41 days.

### II. MONOCLONAL ANTIBODIES AND PRODUCTION THEREOF

[0045] An “isolated antibody” is one that has been separated and/or recovered from a component of its natural environment. Contaminant components of its natural environment are materials that would interfere with diagnostic or therapeutic uses for the antibody, and may include enzymes, hormones, and other proteinaceous or non-proteinaceous solutes. In particular embodiments, the antibody is purified: (1) to greater than 95% by weight of antibody as determined by the Lowry method, and most particularly more than 99% by weight; (2) to a degree sufficient to obtain at least 15 residues of N-terminal or internal amino acid sequence by use of a spinning cup sequenator; or (3) to homogeneity by SDS-PAGE under reducing or non-reducing conditions using Coomassie blue or silver stain. Isolated antibody includes the antibody in situ within recombinant cells since at least one component of the antibody's natural environment will not be present. Ordinarily, however, isolated antibody will be prepared by at least one purification step.

[0046] The basic four-chain antibody unit is a heterotetrameric glycoprotein composed of two identical light (L) chains and two identical heavy (H) chains. An IgM antibody consists of 5 basic heterotetramer units along with an additional polypeptide called J chain, and therefore contain 10 antigen binding sites, while secreted IgA antibodies can polymerize to form polyvalent assemblages comprising 2-5 of the basic 4-chain units along with J chain. In the case of IgGs, the 4-chain unit is generally about 150,000 daltons. Each L chain is linked to an H chain by one covalent disulfide bond, while the two H chains are linked to each other by one or more disulfide bonds depending on the H chain isotype. Each H and L chain also has regularly spaced intrachain disulfide bridges. Each H chain has at the N-terminus, a variable region (V_{H}) followed by three constant domains (C_{H}) for each of the alpha and gamma chains and four C_{H} domains for mu and isotypes. Each L chain has at the N-terminus, a variable region (V_{L}) followed by a constant domain (C_{L}) at its other end. The V_{L} is aligned with the V_{H} and the C_{L} is aligned with the first constant domain of the heavy chain (C_{H1}). Particular amino acid residues are believed to form an interface between the light chain and heavy chain variable regions. The pairing of a V_{H} and V_{L} together forms a single antigen-binding site. For the structure and properties of the different classes of antibodies, see, e.g., Basic and Clinical Immunology, 8th edition, Daniel P. Stites, Abba I. Terr and Tristram G. Parslow (eds.), Appleton & Lange, Norwalk, Conn., 1994, page 71, and Chapter 6.

[0047] The L chain from any vertebrate species can be assigned to one of two clearly distinct types, called kappa and lambda based on the amino acid sequences of their constant domains (C_{L}). Depending on the amino acid sequence of the constant domain of their heavy chains (C_{H}), immunoglobulins can be assigned to different classes or isotypes. There are five classes of immunoglobulins: IgA, IgD, IgE, IgG, and IgM, having heavy chains designated alpha, delta, epsilon, gamma and mu, respectively. They gamma and alpha classes are further divided into subclasses on the basis of relatively minor differences in C_{H} sequence and function, humans express the following subclasses: IgG1, IgG2, IgG3, IgG4, IgA1, and IgA2.

[0048] The term “variable” refers to the fact that certain segments of the V domains differ extensively in sequence among antibodies. The V domain mediates antigen binding and defines specificity of a particular antibody for its particular antigen. However, the variability is not evenly distributed across the 110-amino acid span of the variable regions. Instead, the V regions consist of relatively invariant stretches called framework regions (FRs) of 15-30 amino acids separated by shorter regions of extreme variability called “hypervariable regions” that are each 9-12 amino acids long. The variable regions of native heavy and light chains each comprise four FRs, largely adopting a beta-sheet configuration, connected by three hypervariable regions, which form loops connecting, and in some cases forming part of, the beta-sheet structure. The hypervariable regions in each chain are held together in close proximity by the FRs and, with the hypervariable regions from the other chain, contribute to the formation of the antigen-binding site of antibodies (see Kabat et al., Sequences of Proteins of Immunological Interest, 5th Ed. Public Health Service, National Institutes of Health, Bethesda, Md. (1991)). The constant domains are not involved directly in binding an antibody to an antigen, but exhibit various effector functions, such as participation of the antibody in antibody dependent cellular cytotoxicity (ADCC), antibody-dependent cellular phagocytosis (ADCP), antibody-dependent neutrophil phagocytosis (ADNP), and antibody-dependent complement deposition (ADCD).

[0049] The term “hypervariable region” when used herein refers to the amino acid residues of an antibody that are responsible for antigen binding. The hypervariable region generally comprises amino acid residues from a “complementarity determining region” or “CDR” (e.g., around about residues 24-34 (L1), 50-56 (L2) and 89-97 (L3) in the V_{L}, and around about 31-35 (H1), 50-65 (H2) and 95-102 (H3) in the V_{H} when numbered in accordance with the Kabat numbering system; Kabat et al., Sequences of Proteins of Immunological Interest, 5th Ed. Public Health Service, National Institutes of Health, Bethesda, Md. (1991)); and/or those residues from a “hypervariable loop” (e.g., residues 24-34 (L1), 50-56 (L2) and 89-97 (L3) in the V_{L}, and 26-32 (H1), 52-56 (H2) and 95-101 (H3) in the V_{H} when numbered in accordance with the Chothia numbering system; Chothia and Lesk, J. Mol. Biol. 196:901-917 (1987)); and/or those residues from a “hypervariable loop”/CDR (e.g., residues 27-38 (L1), 56-65 (L2) and 105-120 (L3) in the V_{L}, and 27-38 (H1), 56-65 (H2) and 105-120 (H3) in the V_{H} when numbered in accordance with the IMGT numbering system; Lefranc, M. P. et al. Nucl. Acids Res. 27:209-212 (1999), Ruiz, M. et al. Nucl. Acids Res. 28:219-221 (2000)). Optionally the antibody has symmetrical insertions at one or more of the following points 28, 36 (L1), 63, 74-75 (L2) and 123 (L3) in the V_{L}, and 28, 36 (H1), 63, 74-75 (H2) and 123 (H3) in the V_{sub}H when numbered in accordance with AHo; Honneger, A. and Plunkthun, A. J. Mol. Biol. 309:657-670 (2001)).

[0050] By “germline nucleic acid residue” is meant the nucleic acid residue that naturally occurs in a germline gene encoding a constant or variable region. “Germline gene” is the DNA found in a germ cell (i.e., a cell destined to become an egg or in the sperm). A “germline mutation” refers to a heritable change in a particular DNA that has occurred in a germ cell or the zygote at the single-cell stage, and when transmitted to offspring, such a mutation is incorporated in every cell of the body. A germline mutation is in contrast to a somatic mutation which is acquired in a single body cell. In some cases, nucleotides in a germline DNA sequence encoding for a variable region are mutated (i.e., a somatic mutation) and replaced with a different nucleotide.

[0051] The term “monoclonal antibody” as used herein refers to an antibody obtained from a population of substantially homogeneous antibodies, i.e., the individual antibodies comprising the population are identical except for possible naturally occurring mutations that may be present in minor amounts. Monoclonal antibodies are highly specific, being directed against a single antigenic site. Furthermore, in contrast to polyclonal antibody preparations that include different antibodies directed against different determinants (epitopes), each monoclonal antibody is directed against a single determinant on the antigen. In addition to their specificity, the monoclonal antibodies are advantageous in that they may be synthesized uncontaminated by other antibodies. The modifier “monoclonal” is not to be construed as requiring production of the antibody by any particular method. For example, the monoclonal antibodies useful in the present disclosure may be prepared by the hybridoma methodology first described by Kohler et al., Nature, 256:495 (1975), or may be made using recombinant DNA methods in bacterial, eukaryotic animal or plant cells (see, e.g., U.S. Pat. No. 4,816,567) after single cell sorting of an antigen specific B cell, an antigen specific plasmablast responding to an infection or immunization, or capture of linked heavy and light chains from single cells in a bulk sorted antigen specific collection. The “monoclonal antibodies” may also be isolated from phage antibody libraries using the techniques described in Clackson et al., Nature, 352:624-628 (1991) and Marks et al., J. Mol. Biol., 222:581-597 (1991), for example.

[0052] A. General Methods

[0053] It will be understood that monoclonal antibodies binding to SARS-CoV-2 will have several applications. These include the production of diagnostic kits for use in detecting and diagnosing SARS-CoV-2 infection, as well as for treating the same. In these contexts, one may link such antibodies to diagnostic or therapeutic agents, use them as capture agents or competitors in competitive assays, or use them individually without additional agents being attached thereto. The antibodies may be mutated or modified, as discussed further below. Methods for preparing and characterizing antibodies are well known in the art (see, e.g., Antibodies: A Laboratory Manual, Cold Spring Harbor Laboratory, 1988; U.S. Pat. No. 4,196,265).

[0054] The methods for generating monoclonal antibodies (MAbs) generally begin along the same lines as those for preparing polyclonal antibodies. The first step for both these methods is immunization of an appropriate host or identification of subjects who are immune due to prior natural infection or vaccination with a licensed or experimental vaccine. As is well known in the art, a given composition for immunization may vary in its immunogenicity. It is often necessary therefore to boost the host immune system, as may be achieved by coupling a peptide or polypeptide immunogen to a carrier. Exemplary and preferred carriers are keyhole limpet hemocyanin (KLH) and bovine serum albumin (BSA). Other albumins such as ovalbumin, mouse serum albumin or rabbit serum albumin can also be used as carriers. Means for conjugating a polypeptide to a carrier protein are well known in the art and include glutaraldehyde, m-maleimidobencoyl-N-hydroxysuccinimide ester, carbodiimyde and bis-biazotized benzidine. As also is well known in the art, the immunogenicity of a particular immunogen composition can be enhanced by the use of non-specific stimulators of the immune response, known as adjuvants. Exemplary and preferred adjuvants in animals include complete Freund's adjuvant (a non-specific stimulator of the immune response containing killed Mycobacterium tuberculosis), incomplete Freund's adjuvants and aluminum hydroxide adjuvant and in humans include alum, CpG, MFP59 and combinations of immunostimulatory molecules (“Adjuvant Systems”, such as AS01 or AS03). Additional experimental forms of inoculation to induce SARS-CoV-2-specific B cells is possible, including nanoparticle vaccines, or gene-encoded antigens delivered as DNA or RNA genes in a physical delivery system (such as lipid nanoparticle or on a gold biolistic bead), and delivered with needle, gene gun, transcutaneous electroporation device. The antigen gene also can be carried as encoded by a replication competent or defective viral vector such as adenovirus, adeno-associated virus, poxvirus, herpesvirus, or alphavirus replicon, or alternatively a virus like particle.

[0055] In the case of human antibodies against natural pathogens, a suitable approach is to identify subjects that have been exposed to the pathogens, such as those who have been diagnosed as having contracted the disease, or those who have been vaccinated to generate protective immunity against the pathogen or to test the safety or efficacy of an experimental vaccine. Circulating anti-pathogen antibodies can be detected, and antibody encoding or producing B cells from the antibody-positive subject may then be obtained.

[0056] The amount of immunogen composition used in the production of polyclonal antibodies varies upon the nature of the immunogen as well as the animal used for immunization. A variety of routes can be used to administer the immunogen (subcutaneous, intramuscular, intradermal, intravenous and intraperitoneal). The production of polyclonal antibodies may be monitored by sampling blood of the immunized animal at various points following immunization. A second, booster injection, also may be given. The process of boosting and titering is repeated until a suitable titer is achieved. When a desired level of immunogenicity is obtained, the immunized animal can be bled and the serum isolated and stored, and/or the animal can be used to generate MAbs.

[0057] Following immunization, somatic cells with the potential for producing antibodies, specifically B lymphocytes (B cells), are selected for use in the MAb generating protocol. These cells may be obtained from biopsied spleens, lymph nodes, tonsils or adenoids, bone marrow aspirates or biopsies, tissue biopsies from mucosal organs like lung or GI tract, or from circulating blood. The antibody-producing B lymphocytes from the immunized animal or immune human are then fused with cells of an immortal myeloma cell, generally one of the same species as the animal that was immunized or human or human/mouse chimeric cells. Myeloma cell lines suited for use in hybridoma-producing fusion procedures preferably are non-antibody-producing, have high fusion efficiency, and enzyme deficiencies that render then incapable of growing in certain selective media which support the growth of only the desired fused cells (hybridomas). Any one of a number of myeloma cells may be used, as are known to those of skill in the art (Goding, pp. 65-66, 1986; Campbell, pp. 75-83, 1984). HMMA2.5 cells or MFP-2 cells are particularly useful examples of such cells.

[0058] Methods for generating hybrids of antibody-producing spleen or lymph node cells and myeloma cells usually comprise mixing somatic cells with myeloma cells in a 2:1 proportion, though the proportion may vary from about 20:1 to about 1:1, respectively, in the presence of an agent or agents (chemical or electrical) that promote the fusion of cell membranes. In some cases, transformation of human B cells with Epstein Barr virus (EBV) as an initial step increases the size of the B cells, enhancing fusion with the relatively large-sized myeloma cells. Transformation efficiency by EBV is enhanced by using CpG and a Chk2 inhibitor drug in the transforming medium. Alternatively, human B cells can be activated by co-culture with transfected cell lines expressing CD40 Ligand (CD154) in medium containing additional soluble factors, such as IL-21 and human B cell Activating Factor (BAFF), a Type II member of the TNF superfamily. Fusion methods using Sendai virus have been described by Kohler and Milstein (1975; 1976), and those using polyethylene glycol (PEG), such as 37% (v/v) PEG, by Gefter et al. (1977). The use of electrically induced fusion methods also is appropriate (Goding, pp. 71-74, 1986) and there are processes for better efficiency (Yu et al., 2008). Fusion procedures usually produce viable hybrids at low frequencies, about 1×10⁻⁶ to 1×10⁻⁸, but with optimized procedures one can achieve fusion efficiencies close to 1 in 200 (Yu et al., 2008). However, relatively low efficiency of fusion does not pose a problem, as the viable, fused hybrids are differentiated from the parental, infused cells (particularly the infused myeloma cells that would normally continue to divide indefinitely) by culturing in a selective medium. The selective medium is generally one that contains an agent that blocks the de novo synthesis of nucleotides in the tissue culture medium. Exemplary and preferred agents are aminopterin, methotrexate, and azaserine. Aminopterin and methotrexate block de novo synthesis of both purines and pyrimidines, whereas azaserine blocks only purine synthesis. Where aminopterin or methotrexate is used, the medium is supplemented with hypoxanthine and thymidine as a source of nucleotides (HAT medium). Where azaserine is used, the medium is supplemented with hypoxanthine. Ouabain is added if the B cell source is an EBV-transformed human B cell line, in order to eliminate EBV-transformed lines that have not fused to the myeloma.

[0059] The preferred selection medium is HAT or HAT with ouabain. Only cells capable of operating nucleotide salvage pathways are able to survive in HAT medium. The myeloma cells are defective in key enzymes of the salvage pathway, e.g., hypoxanthine phosphoribosyl transferase (HPRT), and they cannot survive. The B cells can operate this pathway, but they have a limited life span in culture and generally die within about two weeks. Therefore, the only cells that can survive in the selective media are those hybrids formed from myeloma and B cells. When the source of B cells used for fusion is a line of EBV-transformed B cells, as here, ouabain may also be used for drug selection of hybrids as EBV-transformed B cells are susceptible to drug killing, whereas the myeloma partner used is chosen to be ouabain resistant.

[0060] Culturing provides a population of hybridomas from which specific hybridomas are selected. Typically, selection of hybridomas is performed by culturing the cells by single-clone dilution in microtiter plates, followed by testing the individual clonal supernatants (after about two to three weeks) for the desired reactivity. The assay should be sensitive, simple and rapid, such as radioimmunoassays, enzyme immunoassays, cytotoxicity assays, plaque assays dot immunobinding assays, and the like. The selected hybridomas are then serially diluted or single-cell sorted by flow cytometric sorting and cloned into individual antibody-producing cell lines, which clones can then be propagated indefinitely to provide mAbs. The cell lines may be exploited for MAb production in two basic ways. A sample of the hybridoma can be injected (often into the peritoneal cavity) into an animal (e.g., a mouse). Optionally, the animals are primed with a hydrocarbon, especially oils such as pristane (tetramethylpentadecane) prior to injection. When human hybridomas are used in this way, it is optimal to inject immunocompromised mice, such as SCID mice, to prevent tumor rejection. The injected animal develops tumors secreting the specific monoclonal antibody produced by the fused cell hybrid. The body fluids of the animal, such as serum or ascites fluid, can then be tapped to provide MAbs in high concentration. The individual cell lines could also be cultured in vitro, where the MAbs are naturally secreted into the culture medium from which they can be readily obtained in high concentrations. Alternatively, human hybridoma cells lines can be used in vitro to produce immunoglobulins in cell supernatant. The cell lines can be adapted for growth in serum-free medium to optimize the ability to recover human monoclonal immunoglobulins of high purity.

[0061] MAbs produced by either means may be further purified, if desired, using filtration, centrifugation and various chromatographic methods such as FPLC or affinity chromatography. Fragments of the monoclonal antibodies of the disclosure can be obtained from the purified monoclonal antibodies by methods which include digestion with enzymes, such as pepsin or papain, and/or by cleavage of disulfide bonds by chemical reduction. Alternatively, monoclonal antibody fragments encompassed by the present disclosure can be synthesized using an automated peptide synthesizer.

[0062] It also is contemplated that a molecular cloning approach may be used to generate monoclonal antibodies. Single B cells identified as responding to infection or vaccination because of plasmablast aor activated B cell markers, or memory B cells labelled with the antigen of interest, can be sorted physically using paramagnetic bead selection or flow cytometric sorting, then RNA can be isolated from the single cells and antibody genes amplified by RT-PCR. Various single-cell RNA-seq methods are available to obtain antibody variable genes from single cells. Alternatively, antigen-specific bulk sorted populations of cells can be segregated into microvesicles and the matched heavy and light chain variable genes recovered from single cells using physical linkage of heavy and light chain amplicons, or common barcoding of heavy and light chain genes from a vesicle. Matched heavy and light chain genes from single cells also can be obtained from populations of antigen specific B cells by treating cells with cell-penetrating nanoparticles bearing RT-PCR primers and barcodes for marking transcripts with one barcode per cell. The antibody variable genes also can be isolated by RNA extraction of a hybridoma line and the antibody genes obtained by RT-PCR and cloned into an immunoglobulin expression vector. Alternatively, combinatorial immunoglobulin phagemid libraries are prepared from RNA isolated from the cell lines and phagemids expressing appropriate antibodies are selected by panning using viral antigens. The advantages of this approach over conventional hybridoma techniques are that approximately 10⁴ times as many antibodies can be produced and screened in a single round, and that new specificities are generated by H and L chain combination which further increases the chance of finding appropriate antibodies.

[0063] Other U.S. patents, each incorporated herein by reference, that teach the production of antibodies useful in the present disclosure include U.S. Pat. No. 5,565,332, which describes the production of chimeric antibodies using a combinatorial approach; U.S. Pat. No. 4,816,567 which describes recombinant immunoglobulin preparations; and U.S. Pat. No. 4,867,973 which describes antibody-therapeutic agent conjugates.

[0064] B. Antibodies of the Present Disclosure

[0065] Antibodies according to the present disclosure may be defined, in the first instance, by their binding specificity. Those of skill in the art, by assessing the binding specificity/affinity of a given antibody using techniques well known to those of skill in the art, can determine whether such antibodies fall within the scope of the instant claims. For example, the epitope to which a given antibody bind may consist of a single contiguous sequence of 3 or more (e.g., 3, 4, 5, 6, 7, 8, 9, 10, 11, 12, 13, 14, 15, 16, 17, 18, 19, 20) amino acids located within the antigen molecule (e.g., a linear epitope in a domain). Alternatively, the epitope may consist of a plurality of non-contiguous amino acids or amino acid sequences) located within the antigen molecule (e.g., a conformational epitope).

[0066] Two main categories of S ARS-CoV-2 antigens are the surface spike (S) protein and the internal proteins, especially the nucleocapsid (N) protein. Antibodies to the S protein will be useful for prophylaxis, or therapy, or diagnostics, or for characterizing vaccines. S protein antibodies will have additional binding specificity with that protein, with particular antibodies binding to the full-length ectodomain of the SARS-CoV-2 S protein (presented as a monomer or oligomer such as a timer; with our without conformation stabilizing mutations such as introduction of prolines at critical sites (“2P mutation”)) and (a) anti-S protein antibodies that binds to the receptor binding domain (RBD), (b) anti-S protein antibodies that bind to domains other than the RBD. Some of the subset that bind to domains other than the RBD bind to the N terminal domain (NTD), while others bind to an epitope other than the NTD or RBD), and (c) S protein antibodies may further be found to neutralize SARS-CoV-2 by blocking binding of the SARS-CoV-2 S protein to its receptor, human angiotensin-converting enzyme 2 (hACE2), with others that neutralize but do not block receptor binding. Finally, antibodies can cross-react with both SARS-CoV-2 S protein and the S protein of other coronaviruses such as SARS-CoV, MERS-CoV, HCoV-229E, HCoV-OC43, HCoV-NL63 and/or HCoV-HKU1, as well as cross-neutralize both SARS-CoV-2 and these other coronaviruses.

[0067] Another specificity will be antibodies that bind to N antibodies (or other internal targets) that will have primarily diagnostics uses. For example, antibodies to N or other internal proteins of SARS-CoV-2 that specifically recognize SARS-CoV-2 or that cross-reactively recognize SARS-CoV-2 and other coronaviruses such as SARS-CoV, MERS-CoV, HCoV-229E, HCoV-OC43, HCoV-NL63 and/or HCoV-HKU1.

[0068] Various techniques known to persons of ordinary skill in the art can be used to determine whether an antibody “interacts with one or more amino acids” within a polypeptide or protein, Exemplary techniques include, for example, routine cross-Hocking assays, such as that described in Antibodies, Harlow and Lane (Cold Spring Harbor Press, Cold Spring Harbor, N.Y.), Cross-blocking can be measured in various binding assays such as ELISA, biolayer interferometry, or surface plasmon resonance. Other methods include alanine scanning mutational analysis, peptide blot analysis (Reineke, Methods Mol. Biol. 248: 443-63, 2004), peptide cleavage analysis, high-resolution electron microscopy techniques using single particle reconstruction, cryoEM, or tomography, crystallographic studies and NMR analysis. In addition, methods such as epitope excision, epitope extraction and chemical modification of antigens can be employed (Tomer Prot. Sci. 9: 487-496, 2000), Another method that can be used to identify the amino acids within a polypeptide with which an antibody interacts is hydrogen/deuterium exchange detected by mass spectrometry, in general terms, the hydrogen/deuterium exchange method involves deuterium-labeling the protein of interest, followed by binding the antibody to the deuterium-labeled protein. Next, the protein/antibody complex is transferred to water and exchangeable protons within amino acids that are protected by the antibody complex undergo deuterium-to-hydrogen back-exchange at a slower rate than exchangeable protons within amino acids that are not part of the interface. As a result, amino acids that form part of the protein/antibody interface may retain deuterium and therefore exhibit relatively higher mass compared to amino acids not included in the interface. After dissociation of the antibody, the target protein is subjected to protease cleavage and mass spectrometry analysis, thereby revealing the deuterium-labeled residues which correspond to the specific amino acids with which the antibody interacts. See, e.g., Ehring, Analytical Biochemistry 267: 252-259 (1999); Engen and Smith, Anal. Chem. 73: 256A-265A (2001). When the antibody neutralizes SARS-CoV-2, antibody escape mutant variant organisms can be isolated by propagating SARS-CoV-2 in vitro or in animal models in the presence of high concentrations of the antibody. Sequence analysis of the SARS-CoV-2 gene encoding the antigen targeted by the antibody reveals the mutation(s) conferring antibody escape, indicating residues in the epitope or that affect the structure of the epitope allosterically.

[0069] The term “epitope” refers to a site on an antigen to which B and/or T cells respond. B-cell epitopes can be formed both from contiguous amino acids or noncontiguous amino acids juxtaposed by tertiary folding of a protein. Epitopes formed from contiguous amino acids are typically retained on exposure to denaturing solvents, whereas epitopes formed by tertiary folding are typically lost on treatment with denaturing solvents. An epitope typically includes at least 3, and more usually, at least 5 or 8-10 amino acids in a unique spatial conformation.

[0070] Modification-Assisted Profiling (MAP), also known as Antigen Structure-based Antibody Profiling (ASAP) is a method that categorizes large numbers of monoclonal antibodies (mAbs) directed against the same antigen according to the similarities of the binding profile of each antibody to chemically or enzymatically modified antigen surfaces (see U.S. Patent Publication 2004/0101920, herein specifically incorporated by reference in its entirety). Each category may reflect a unique epitope either distinctly different from or partially overlapping with epitope represented by another category. This technology allows rapid filtering of genetically identical antibodies, such that characterization can be focused on genetically distinct antibodies. When applied to hybridoma screening, MAP may facilitate identification of rare hybridoma clones that produce mAbs having the desired characteristics. MAP may be used to sort the antibodies of the disclosure into groups of antibodies binding different epitopes.

[0071] The present disclosure includes antibodies that may bind to the same epitope, or a portion of the epitope. Likewise, the present disclosure also includes antibodies that compete for binding to a target or a fragment thereof with any of the specific exemplary antibodies described herein. One can easily determine whether an antibody binds to the same epitope as, or competes for binding with, a reference antibody by using routine methods known in the art. For example, to determine if a test antibody binds to the same epitope as a reference, the reference antibody is allowed to bind to target under saturating conditions. Next, the ability of a test antibody to bind to the target molecule is assessed. If the test antibody is able to bind to the target molecule following saturation binding with the reference antibody, it can be concluded that the test antibody binds to a different epitope than the reference antibody. On the other hand, if the test antibody is not able to bind to the target molecule following saturation binding with the reference antibody, then the test antibody may bind to the same epitope as the epitope bound by the reference antibody.

[0072] To determine if an antibody competes for binding with a reference anti-SARS-CoV-2 antibody, the above-described binding methodology is performed in two orientations: In a first orientation, the reference antibody is allowed to bind to the SARS-CoV-2 antigen under saturating conditions followed by assessment of binding of the test antibody to the SARS-CoV-2 molecule. In a second orientation, the test antibody is allowed to bind to the SARS-CoV-2 antigen molecule under saturating conditions followed by assessment of binding of the reference antibody to the SARS-CoV-2 molecule. If, in both orientations, only the first (saturating) antibody is capable of binding to SARS-CoV-2, then it is concluded that the test antibody and the reference antibody compete for binding to SARS-CoV-2. As will be appreciated by a person of ordinary skill in the art, an antibody that competes for binding with a reference antibody may not necessarily bind to the identical epitope as the reference antibody but may sterically block binding of the reference antibody by binding an overlapping or adjacent epitope.

[0073] Two antibodies bind to the same or overlapping epitope if each competitively inhibits (blocks) binding of the other to the antigen. That is, a 1-, 5-, 10-, 20- or 100-fold excess of one antibody inhibits binding of the other by at least 50% but preferably 75%, 90% or even 99% as measured in a competitive binding assay (see, e.g., Junghans et al Cancer Res. 1990 50:1495-1502). Alternatively, two antibodies have the same epitope if essentially all amino acid mutations in the antigen that reduce or eliminate binding of one antibody reduce or eliminate binding of the other. Two antibodies have overlapping epitopes if some amino acid mutations that reduce or eliminate binding of one antibody reduce or eliminate binding of the other.

[0074] Additional routine experimentation (e.g., peptide mutation and binding analyses) can then be carried out to confirm whether the observed lack of binding of the test antibody is in fact due to binding to the same epitope as the reference antibody or if steric blocking (or another phenomenon) is responsible for the lack of observed binding. Experiments of this sort can be performed using ELISA, RIA, surface plasmon resonance, flow cytometry or any other quantitative or qualitative antibody-binding assay available in the art. Structural studies with EM or crystallography also can demonstrate whether or not two antibodies that compete for binding recognize the same epitope.

[0075] In another aspect, there are provided monoclonal antibodies having clone-paired CDRs from the heavy and light chains as illustrated in Tables 3 and 4, respectively. Such antibodies may be produced by the clones discussed below in the Examples section using methods described herein.

[0076] In another aspect, the antibodies may be defined by their variable sequence, which include additional “framework” regions. Furthermore, the antibodies sequences may vary from these sequences, optionally using methods discussed in greater detail below. For example, nucleic acid sequences may vary from those set out above in that (a) the variable regions may be segregated away from the constant domains of the light and heavy chains, (b) the nucleic acids may vary from those set out above while not affecting the residues encoded thereby, (c) the nucleic acids may vary from those set out above by a given percentage, e.g., 70%, 75%, 80%, 85%, 90%, 91%, 92%, 93%, 94%, 95%, 96%, 97%, 98% or 99% homology, (d) the nucleic acids may vary from those set out above by virtue of the ability to hybridize under high stringency conditions, as exemplified by low salt and/or high temperature conditions, such as provided by about 0.02 M to about 0.15 M NaCl at temperatures of about 50° C. to about 70° C., (e) the amino acids may vary from those set out above by a given percentage, e.g., 80%, 85%, 90%, 91%, 92%, 93%, 94%, 95%, 96%, 97%, 98% or 99% homology, or (f) the amino acids may vary from those set out above by permitting conservative substitutions (discussed below). Each of the foregoing applies to the nucleic acid sequences and the amino acid sequences.

[0077] When comparing polynucleotide and polypeptide sequences, two sequences are said to be “identical” if the sequence of nucleotides or amino acids in the two sequences is the same when aligned for maximum correspondence, as described below. Comparisons between two sequences are typically performed by comparing the sequences over a comparison window to identify and compare local regions of sequence similarity. A “comparison window” as used herein, refers to a segment of at least about 20 contiguous positions, usually 30 to about 75, 40 to about 50, in which a sequence may be compared to a reference sequence of the same number of contiguous positions after the two sequences are optimally aligned.

[0078] Optimal alignment of sequences for comparison may be conducted using the Megalign program in the Lasergene suite of bioinformatics software (DNASTAR, Inc., Madison, Wis.), using default parameters. This program embodies several alignment schemes described in the following references: Dayhoff, M. O. (1978) A model of evolutionary change in proteins—Matrices for detecting distant relationships. In Dayhoff, M. O. (ed.) Atlas of Protein Sequence and Structure, National Biomedical Research Foundation, Washington D.C. Vol. 5, Suppl. 3, pp. 345-358; Hein J. (1990) Unified Approach to Alignment and Phylogeny pp. 626-645 Methods in Enzymology vol. 183, Academic Press, Inc., San Diego, Calif.; Higgins, D. G. and Sharp, P. M. (1989) CABIOS 5:151-153; Myers, E. W. and Muller W. (1988) CABIOS 4:11-17; Robinson, E. D. (1971) Comb. Theor 11:105; Santou, N. Nes, M. (1987) Mol. Biol. Evol. 4:406-425; Sneath, P. H. A. and Sokal, R. R. (1973) Numerical Taxonomy—the Principles and Practice of Numerical Taxonomy, Freeman Press, San Francisco, Calif.; Wilbur, W. J. and Lipman, D. J. (1983) Proc. Natl. Acad., Sci. USA 80:726-730.

[0079] Alternatively, optimal alignment of sequences for comparison may be conducted by the local identity algorithm of Smith and Waterman (1981) Add. APL. Math 2:482, by the identity alignment algorithm of Needleman and Wunsch (1970) J. Mol. Biol. 48:443, by the search for similarity methods of Pearson and Lipman (1988) Proc. Natl. Acad. Sci. USA 85: 2444, by computerized implementations of these algorithms (GAP, BESTFIT, BLAST, FASTA, and TFASTA in the Wisconsin Genetics Software Package, Genetics Computer Group (GCG), 575 Science Dr., Madison, Wis.), or by inspection.

[0080] One particular example of algorithms that are suitable for determining percent sequence identity and sequence similarity are the BLAST and BLAST 2.0 algorithms, which are described in Altschul et al. (1977) Nucl. Acids Res. 25:3389-3402 and Altschul et al. (1990) J. Mol. Biol. 215:403-410, respectively. BLAST and BLAST 2.0 can be used, for example, with the parameters described herein, to determine percent sequence identity for the polynucleotides and polypeptides of the disclosure. Software for performing BLAST analyses is publicly available through the National Center for Biotechnology Information. The rearranged nature of an antibody sequence and the variable length of each gene requires multiple rounds of BLAST searches for a single antibody sequence. Also, manual assembly of different genes is difficult and error-prone. The sequence analysis tool IgBLAST (world-wide-web at ncbi.nlm.nih.gov/igblast/) identifies matches to the germline V, D and J genes, details at rearrangement junctions, the delineation of Ig V domain framework regions and complementarity determining regions. IgBLAST can analyze nucleotide or protein sequences and can process sequences in batches and allows searches against the germline gene databases and other sequence databases simultaneously to minimize the chance of missing possibly the best matching germline V gene.

[0081] In one illustrative example, cumulative scores can be calculated using, for nucleotide sequences, the parameters M (reward score for a pair of matching residues; always >0) and N (penalty score for mismatching residues; always <0). Extension of the word hits in each direction are halted when: the cumulative alignment score falls off by the quantity X from its maximum achieved value; the cumulative score goes to zero or below, due to the accumulation of one or more negative-scoring residue alignments; or the end of either sequence is reached. The BLAST algorithm parameters W, T and X determine the sensitivity and speed of the alignment. The BLASTN program (for nucleotide sequences) uses as defaults a wordlength (W) of 11, and expectation (E) of 10, and the BLOSUM62 scoring matrix (see Henikoff and Henikoff (1989) Proc. Natl. Acad. Sci. USA 89:10915) alignments, (B) of 50, expectation (E) of 10, M=5, N=−4 and a comparison of both strands.

[0082] For amino acid sequences, a scoring matrix can be used to calculate the cumulative score. Extension of the word hits in each direction are halted when: the cumulative alignment score falls off by the quantity X from its maximum achieved value; the cumulative score goes to zero or below, due to the accumulation of one or more negative-scoring residue alignments; or the end of either sequence is reached. The BLAST algorithm parameters W, T and X determine the sensitivity and speed of the alignment.

[0083] In one approach, the “percentage of sequence identity” is determined by comparing two optimally aligned sequences over a window of comparison of at least 20 positions, wherein the portion of the polynucleotide or polypeptide sequence in the comparison window may comprise additions or deletions (i.e., gaps) of 20 percent or less, usually 5 to 15 percent, or 10 to 12 percent, as compared to the reference sequences (which does not comprise additions or deletions) for optimal alignment of the two sequences. The percentage is calculated by determining the number of positions at which the identical nucleic acid bases or amino acid residues occur in both sequences to yield the number of matched positions, dividing the number of matched positions by the total number of positions in the reference sequence (i.e., the window size) and multiplying the results by 100 to yield the percentage of sequence identity.

[0084] Yet another way of defining an antibody is as a “derivative” of any of the below-described antibodies and their antigen-binding fragments. The term “derivative” refers to an antibody or antigen-binding fragment thereof that immunospecifically binds to an antigen but which comprises, one, two, three, four, five or more amino acid substitutions, additions, deletions or modifications relative to a “parental” (or wild-type) molecule. Such amino acid substitutions or additions may introduce naturally occurring (i.e., DNA-encoded) or non-naturally occurring amino acid residues. The term “derivative” encompasses, for example, as variants having altered CH1, hinge, CH2, CH3 or CH4 regions, so as to form, for example, antibodies, etc., having variant Fc regions that exhibit enhanced or impaired effector or binding characteristics. The term “derivative” additionally encompasses non-amino acid modifications, for example, amino acids that may be glycosylated (e.g., have altered mannose, 2-N-acetylglucosamine, galactose, fucose, glucose, sialic acid, 5-N-acetylneuraminic acid, 5-glycolneuraminic acid, etc. content), acetylated, pegylated, phosphorylated, amidated, derivatized by known protecting/blocking groups, proteolytic cleavage, linked to a cellular ligand or other protein, etc. In some embodiments, the altered carbohydrate modifications modulate one or more of the following: solubilization of the antibody, facilitation of subcellular transport and secretion of the antibody, promotion of antibody assembly, conformational integrity, and antibody-mediated effector function. In a specific embodiment, the altered carbohydrate modifications enhance antibody mediated effector function relative to the antibody lacking the carbohydrate modification. Carbohydrate modifications that lead to altered antibody mediated effector function are well known in the art (for example, see Shields, R. L. et al. (2002) “Lack Of Fucose On Human IgG N-Linked Oligosaccharide Improves Binding To Human Fcgamma RIII And Antibody-Dependent Cellular Toxicity,” J. Biol. Chem. 277(30): 26733-26740; Davies J. et al. (2001) “Expression Of GnTIII In A Recombinant Anti-CD20 CHO Production Cell Line: Expression Of Antibodies With Altered Glycoforms Leads To An Increase In ADCC Through Higher Affinity For FC Gamma RIII,” Biotechnology & Bioengineering 74(4): 288-294). Methods of altering carbohydrate contents are known to those skilled in the art, see, e.g., Wallick, S. C. et al. (1988) “Glycosylation Of A VH Residue Of A Monoclonal Antibody Against Alpha (1----6) Dextran Increases Its Affinity For Antigen,” J. Exp. Med. 168(3): 1099-1109; Tao, M. H. et al. (1989) “Studies Of Aglycosylated Chimeric Mouse-Human IgG. Role of Carbohydrate in The Structure And Effector Functions Mediated By The Human IgG Constant Region,” J. Immunol. 143(8): 2595-2601; Routledge, E. G. et al. (1995) “The Effect of Aglycosylation on The Immunogenicity of A Humanized Therapeutic CD3 Monoclonal Antibody,” Transplantation 60(8):847-53; Elliott, S. et al. (2003) “Enhancement Of Therapeutic Protein In Vivo Activities Through Glycoengineering,” Nature Biotechnol. 21:414-21; Shields, R. L. et al. (2002) “Lack of Fucose on Human IgG N-Linked Oligosaccharide Improves Binding to Human Fcgamma RIII And Antibody-Dependent Cellular Toxicity,” J. Biol. Chem. 277(30): 26733-26740).

[0085] A derivative antibody or antibody fragment can be generated with an engineered sequence or glycosylation state to confer preferred levels of activity in antibody dependent cellular cytotoxicity (ADCC), antibody-dependent cellular phagocytosis (ADCP), antibody-dependent neutrophil phagocytosis (ADNP), or antibody-dependent complement deposition (ADCD) functions as measured by bead-based or cell-based assays or in vivo studies in animal models.

[0086] A derivative antibody or antibody fragment may be modified by chemical modifications using techniques known to those of skill in the art, including, but not limited to, specific chemical cleavage, acetylation, formulation, metabolic synthesis of tunicamycin, etc. In one embodiment, an antibody derivative will possess a similar or identical function as the parental antibody. In another embodiment, an antibody derivative will exhibit an altered activity relative to the parental antibody. For example, a derivative antibody (or fragment thereof) can bind to its epitope more tightly or be more resistant to proteolysis than the parental antibody.

[0087] C. Engineering of Antibody Sequences

[0088] In various embodiments, one may choose to engineer sequences of the identified antibodies for a variety of reasons, such as improved expression, improved cross-reactivity or diminished off-target binding. Modified antibodies may be made by any technique known to those of skill in the art, including expression through standard molecular biological techniques, or the chemical synthesis of polypeptides. Methods for recombinant expression are addressed elsewhere in this document. The following is a general discussion of relevant goals techniques for antibody engineering.

[0089] Hybridomas may be cultured, then cells lysed, and total RNA extracted. Random hexamers may be used with RT to generate cDNA copies of RNA, and then PCR performed using a multiplex mixture of PCR primers expected to amplify all human variable gene sequences. PCR product can be cloned into pGEM-T Easy vector, then sequenced by automated DNA sequencing using standard vector primers. Assay of binding and neutralization may be performed using antibodies collected from hybridoma supernatants and purified by FPLC, using Protein G columns.

[0090] Recombinant full-length IgG antibodies can be generated by subcloning heavy and light chain Fv DNAs from the cloning vector into an IgG plasmid vector, transfected into 293 (e.g., Freestyle) cells or CHO cells, and antibodies can be collected and purified from the 293 or CHO cell supernatant. Other appropriate host cells systems include bacteria, such as E. coli, insect cells (S2, Sf9, Sf29, High Five), plant cells (e.g., tobacco, with or without engineering for human-like glycans), algae, or in a variety of non-human transgenic contexts, such as mice, rats, goats or cows.

[0091] Expression of nucleic acids encoding antibodies, both for the purpose of subsequent antibody purification, and for immunization of a host, is also contemplated. Antibody coding sequences can be RNA, such as native RNA or modified RNA. Modified RNA contemplates certain chemical modifications that confer increased stability and low immunogenicity to mRNAs, thereby facilitating expression of therapeutically important proteins. For instance, N1-methyl-pseudouridine (N1mΨ) outperforms several other nucleoside modifications and their combinations in terms of translation capacity. In addition to turning off the immune/eIF2α phosphorylation-dependent inhibition of translation, incorporated N1mΨ nucleotides dramatically alter the dynamics of the translation process by increasing ribosome pausing and density on the mRNA. Increased ribosome loading of modified mRNAs renders them more permissive for initiation by favoring either ribosome recycling on the same mRNA or de novo ribosome recruitment. Such modifications could be used to enhance antibody expression in vivo following inoculation with RNA. The RNA, whether native or modified, may be delivered as naked RNA or in a delivery vehicle, such as a lipid nanoparticle.

[0092] Alternatively, DNA encoding the antibody may be employed for the same purposes. The DNA is included in an expression cassette comprising a promoter active in the host cell for which it is designed. The expression cassette is advantageously included in a replicable vector, such as a conventional plasmid or minivector. Vectors include viral vectors, such as poxviruses, adenoviruses, herpesviruses, adeno-associated viruses, and lentiviruses are contemplated. Replicons encoding antibody genes such as alphavirus replicons based on VEE virus or Sindbis virus are also contemplated. Delivery of such vectors can be performed by needle through intramuscular, subcutaneous, or intradermal routes, or by transcutaneous electroporation when in vivo expression is desired.

[0093] The rapid availability of antibody produced in the same host cell and cell culture process as the final cGMP manufacturing process has the potential to reduce the duration of process development programs. Lonza has developed a generic method using pooled transfectants grown in CDACF medium, for the rapid production of small quantities (up to 50 g) of antibodies in CHO cells. Although slightly slower than a true transient system, the advantages include a higher product concentration and use of the same host and process as the production cell line. Example of growth and productivity of GS-CHO pools, expressing a model antibody, in a disposable bioreactor: in a disposable bag bioreactor culture (5 L working volume) operated in fed-batch mode, a harvest antibody concentration of 2 g/L was achieved within 9 weeks of transfection.

[0094] Antibody molecules will comprise fragments (such as F(ab′), F(ab′)₂) that are produced, for example, by the proteolytic cleavage of the mAbs, or single-chain immunoglobulins producible, for example, via recombinant means. F(ab′) antibody derivatives are monovalent, while F(ab′)₂ antibody derivatives are bivalent. In one embodiment, such fragments can be combined with one another, or with other antibody fragments or receptor ligands to form “chimeric” binding molecules. Significantly, such chimeric molecules may contain substituents capable of binding to different epitopes of the same molecule.

[0095] In related embodiments, the antibody is a derivative of the disclosed antibodies, e.g., an antibody comprising the CDR sequences identical to those in the disclosed antibodies (e.g., a chimeric, or CDR-grafted antibody). Alternatively, one may wish to make modifications, such as introducing conservative changes into an antibody molecule. In making such changes, the hydropathic index of amino acids may be considered. The importance of the hydropathic amino acid index in conferring interactive biologic function on a protein is generally understood in the art (Kyte and Doolittle, 1982). It is accepted that the relative hydropathic character of the amino acid contributes to the secondary structure of the resultant protein, which in turn defines the interaction of the protein with other molecules, for example, enzymes, substrates, receptors, DNA, antibodies, antigens, and the like.

[0096] It also is understood in the art that the substitution of like amino acids can be made effectively on the basis of hydrophilicity. U.S. Pat. No. 4,554,101, incorporated herein by reference, states that the greatest local average hydrophilicity of a protein, as governed by the hydrophilicity of its adjacent amino acids, correlates with a biological property of the protein. As detailed in U.S. Pat. No. 4,554,101, the following hydrophilicity values have been assigned to amino acid residues: basic amino acids: arginine (+3.0), lysine (+3.0), and histidine (−0.5); acidic amino acids: aspartate (+3.0±1), glutamate (+3.0±1), asparagine (+0.2), and glutamine (+0.2); hydrophilic, nonionic amino acids: serine (+0.3), asparagine (+0.2), glutamine (+0.2), and threonine (−0.4), sulfur containing amino acids: cysteine (−1.0) and methionine (−1.3); hydrophobic, nonaromatic amino acids: valine (−1.5), leucine (−1.8), isoleucine (−1.8), proline (−0.5±1), alanine (−0.5), and glycine (0); hydrophobic, aromatic amino acids: tryptophan (−3.4), phenylalanine (−2.5), and tyrosine (−2.3).

[0097] It is understood that an amino acid can be substituted for another having a similar hydrophilicity and produce a biologically or immunologically modified protein. In such changes, the substitution of amino acids whose hydrophilicity values are within ±2 is preferred, those that are within ±1 are particularly preferred, and those within ±0.5 are even more particularly preferred.

[0098] As outlined above, amino acid substitutions generally are based on the relative similarity of the amino acid side-chain substituents, for example, their hydrophobicity, hydrophilicity, charge, size, and the like. Exemplary substitutions that take into consideration the various foregoing characteristics are well known to those of skill in the art and include: arginine and lysine; glutamate and aspartate; serine and threonine; glutamine and asparagine; and valine, leucine and isoleucine.

[0099] The present disclosure also contemplates isotype modification. By modifying the Fc region to have a different isotype, different functionalities can be achieved. For example, changing to IgG₁ can increase antibody dependent cell cytotoxicity, switching to class A can improve tissue distribution, and switching to class M can improve valency.

[0100] Alternatively or additionally, it may be useful to combine amino acid modifications with one or more further amino acid modifications that alter C1q binding and/or the complement dependent cytotoxicity (CDC) function of the Fc region of an IL-23p19 binding molecule. The binding polypeptide of particular interest may be one that binds to C1q and displays complement dependent cytotoxicity. Polypeptides with pre-existing C1q binding activity, optionally further having the ability to mediate CDC may be modified such that one or both of these activities are enhanced. Amino acid modifications that alter C1q and/or modify its complement dependent cytotoxicity function are described, for example, in WO/0042072, which is hereby incorporated by reference.

[0101] One can design an Fc region of an antibody with altered effector function, e.g., by modifying C1q binding and/or FcγR binding and thereby changing CDC activity and/or ADCC activity. “Effector functions” are responsible for activating or diminishing a biological activity (e.g., in a subject). Examples of effector functions include, but are not limited to: C1q binding; complement dependent cytotoxicity (CDC); Fc receptor binding; antibody-dependent cell-mediated cytotoxicity (ADCC); phagocytosis; down regulation of cell surface receptors (e.g., B cell receptor; BCR), etc. Such effector functions may require the Fc region to be combined with a binding domain (e.g., an antibody variable domain) and can be assessed using various assays (e.g., Fc binding assays, ADCC assays, CDC assays, etc.).

[0102] For example, one can generate a variant Fc region of an antibody with improved C1q binding and improved FcγRIII binding (e.g., having both improved ADCC activity and improved CDC activity). Alternatively, if it is desired that effector function be reduced or ablated, a variant Fc region can be engineered with reduced CDC activity and/or reduced ADCC activity. In other embodiments, only one of these activities may be increased, and, optionally, also the other activity reduced (e.g., to generate an Fc region variant with improved ADCC activity, but reduced CDC activity and vice versa).

[0103] FcRn binding. Fc mutations can also be introduced and engineered to alter their interaction with the neonatal Fc receptor (FcRn) and improve their pharmacokinetic properties. A collection of human Fc variants with improved binding to the FcRn have been described (Shields et al., (2001). High resolution mapping of the binding site on human IgG1 for FcγRI, FcγRII, FcγRIII, and FcRn and design of IgG1 variants with improved binding to the FcγR, (J. Biol. Chem. 276:6591-6604). A number of methods are known that can result in increased half-life (Kuo and Aveson, (2011)), including amino acid modifications may be generated through techniques including alanine scanning mutagenesis, random mutagenesis and screening to assess the binding to the neonatal Fc receptor (FcRn) and/or the in vivo behavior. Computational strategies followed by mutagenesis may also be used to select one of amino acid mutations to mutate.

[0104] The present disclosure therefore provides a variant of an antigen binding protein with optimized binding to FcRn. In a particular embodiment, the said variant of an antigen binding protein comprises at least one amino acid modification in the Fc region of said antigen binding protein, wherein said modification is selected from the group consisting of 226, 227, 228, 230, 231, 233, 234, 239, 241, 243, 246, 250, 252, 256, 259, 264, 265, 267, 269, 270, 276, 284, 285, 288, 289, 290, 291, 292, 294, 297, 298, 299, 301, 302, 303, 305, 307, 308, 309, 311, 315, 317, 320, 322, 325, 327, 330, 332, 334, 335, 338, 340, 342, 343, 345, 347, 350, 352, 354, 355, 356, 359, 360, 361, 362, 369, 370, 371, 375, 378, 380, 382, 384, 385, 386, 387, 389, 390, 392, 393, 394, 395, 396, 397, 398, 399, 400, 401403, 404, 408, 411, 412, 414, 415, 416, 418, 419, 420, 421, 422, 424, 426, 428, 433, 434, 438, 439, 440, 443, 444, 445, 446 and 447 of the Fc region as compared to said parent polypeptide, wherein the numbering of the amino acids in the Fc region is that of the EU index in Kabat. In a further aspect of the disclosure the modifications are M252Y/S254T/T256E.

[0105] Additionally, various publications describe methods for obtaining physiologically active molecules whose half-lives are modified, see for example Kontermann (2009) either by introducing an FcRn-binding polypeptide into the molecules or by fusing the molecules with antibodies whose FcRn-binding affinities are preserved but affinities for other Fc receptors have been greatly reduced or fusing with FcRn binding domains of antibodies.

[0106] Derivatized antibodies may be used to alter the half-lives (e.g., serum half-lives) of parental antibodies in a mammal, particularly a human. Such alterations may result in a half-life of greater than 15 days, preferably greater than 20 days, greater than 25 days, greater than 30 days, greater than 35 days, greater than 40 days, greater than 45 days, greater than 2 months, greater than 3 months, greater than 4 months, or greater than 5 months. The increased half-lives of the antibodies of the present disclosure or fragments thereof in a mammal, preferably a human, results in a higher serum titer of said antibodies or antibody fragments in the mammal, and thus reduces the frequency of the administration of said antibodies or antibody fragments and/or reduces the concentration of said antibodies or antibody fragments to be administered. Antibodies or fragments thereof having increased in vivo half-lives can be generated by techniques known to those of skill in the art. For example, antibodies or fragments thereof with increased in vivo half-lives can be generated by modifying (e.g., substituting, deleting or adding) amino acid residues identified as involved in the interaction between the Fc domain and the FcRn receptor.

[0107] Beltramello et al. (2010) previously reported the modification of neutralizing mAbs, due to their tendency to enhance dengue virus infection, by generating in which leucine residues at positions 1.3 and 1.2 of CH2 domain (according to the IMGT unique numbering for C-domain) were substituted with alanine residues. This modification, also known as “LALA” mutation, abolishes antibody binding to FcγRI, FcγRII and FcγRIIIa, as described by Hessell et al. (2007). The variant and unmodified recombinant mAbs were compared for their capacity to neutralize and enhance infection by the four dengue virus serotypes. LALA variants retained the same neutralizing activity as unmodified mAb but were completely devoid of enhancing activity. LALA mutations of this nature are therefore contemplated in the context of the presently disclosed antibodies.

[0108] Altered Glycosylation. A particular embodiment of the present disclosure is an isolated monoclonal antibody, or antigen binding fragment thereof, containing a substantially homogeneous glycan without sialic acid, galactose, or fucose. The monoclonal antibody comprises a heavy chain variable region and a light chain variable region, both of which may be attached to heavy chain or light chain constant regions respectively. The aforementioned substantially homogeneous glycan may be covalently attached to the heavy chain constant region.

[0109] Another embodiment of the present disclosure comprises a mAb with a novel Fc glycosylation pattern. The isolated monoclonal antibody, or antigen binding fragment thereof, is present in a substantially homogenous composition represented by the GNGN or G1/G2 glycoform. Fc glycosylation plays a significant role in anti-viral and anti-cancer properties of therapeutic mAbs. The disclosure is in line with a recent study that shows increased anti-lentivirus cell-mediated viral inhibition of a fucose free anti-HIV mAb in vitro. This embodiment of the present disclosure with homogenous glycans lacking a core fucose, showed increased protection against specific viruses by a factor greater than two-fold. Elimination of core fucose dramatically improves the ADCC activity of mAbs mediated by natural killer (NK) cells but appears to have the opposite effect on the ADCC activity of polymorphonuclear cells (PMNs).

[0110] The isolated monoclonal antibody, or antigen binding fragment thereof, comprising a substantially homogenous composition represented by the GNGN or G1/G2 glycoform exhibits increased binding affinity for Fc gamma RI and Fc gamma RIII compared to the same antibody without the substantially homogeneous GNGN glycoform and with G0, G1F, G2F, GNF, GNGNF or GNGNFX containing glycoforms. In one embodiment of the present disclosure, the antibody dissociates from Fc gamma RI with a Kd of 1×10⁻⁸ M or less and from Fc gamma RIII with a Kd of 1×10⁻⁷ M or less.

[0111] Glycosylation of an Fc region is typically either N-linked or O-linked. N-linked refers to the attachment of the carbohydrate moiety to the side chain of an asparagine residue. O-linked glycosylation refers to the attachment of one of the sugars N-acetylgalactosamine, galactose, or xylose to a hydroxyamino acid, most commonly serine or threonine, although 5-hydroxyproline or 5-hydroxylysine may also be used. The recognition sequences for enzymatic attachment of the carbohydrate moiety to the asparagine side chain peptide sequences are asparagine-X-serine and asparagine-X-threonine, where X is any amino acid except proline. Thus, the presence of either of these peptide sequences in a polypeptide creates a potential glycosylation site.

[0112] The glycosylation pattern may be altered, for example, by deleting one or more glycosylation site(s) found in the polypeptide, and/or adding one or more glycosylation site(s) that are not present in the polypeptide. Addition of glycosylation sites to the Fc region of an antibody is conveniently accomplished by altering the amino acid sequence such that it contains one or more of the above-described tripeptide sequences (for N-linked glycosylation sites). An exemplary glycosylation variant has an amino acid substitution of residue Asn 297 of the heavy chain. The alteration may also be made by the addition of, or substitution by, one or more serine or threonine residues to the sequence of the original polypeptide (for O-linked glycosylation sites). Additionally, a change of Asn 297 to Ala can remove one of the glycosylation sites.

[0113] In certain embodiments, the antibody is expressed in cells that express beta (1,4)-N-acetylglucosaminyltransferase III (GnT III), such that GnT III adds GlcNAc to the IL-23p19 antibody. Methods for producing antibodies in such a fashion are provided in WO/9954342, WO/03011878, patent publication 20030003097A1, and Umana et al., Nature Biotechnology, 17:176-180, February 1999. Cell lines can be altered to enhance or reduce or eliminate certain post-translational modifications, such as glycosylation, using genome editing technology such as Clustered Regularly Interspaced Short Palindromic Repeats (CRISPR). For example, CRISPR technology can be used to eliminate genes encoding glycosylating enzymes in 293 or CHO cells used to express recombinant monoclonal antibodies.

[0114] Elimination of monoclonal antibody protein sequence liabilities. It is possible to engineer the antibody variable gene sequences obtained from human B cells to enhance their manufacturability and safety. Potential protein sequence liabilities can be identified by searching for sequence motifs associated with sites containing:

[0115] 1) Unpaired Cys residues,

[0116] 2) N-linked glycosylation,

[0117] 3) Asn deamidation,

[0118] 4) Asp isomerization,

[0119] 5) SYE truncation,

[0120] 6) Met oxidation,

[0121] 7) Trp oxidation,

[0122] 8) N-terminal glutamate,

[0123] 9) Integrin binding,

[0124] 10) CD11c/CD18 binding, or

[0125] 11) Fragmentation

Such motifs can be eliminated by altering the synthetic gene for the cDNA encoding recombinant antibodies.

[0126] Protein engineering efforts in the field of development of therapeutic antibodies clearly reveal that certain sequences or residues are associated with solubility differences (Fernandez-Escamilla et al., Nature Biotech., 22 (10), 1302-1306, 2004; Chennamsetty et al., PNAS, 106 (29), 11937-11942, 2009; Voynov et al., Biocon. Chem., 21 (2), 385-392, 2010) Evidence from solubility-altering mutations in the literature indicate that some hydrophilic residues such as aspartic acid, glutamic acid, and serine contribute significantly more favorably to protein solubility than other hydrophilic residues, such as asparagine, glutamine, threonine, lysine, and arginine.

[0127] Stability. Antibodies can be engineered for enhanced biophysical properties. One can use elevated temperature to unfold antibodies to determine relative stability, using average apparent melting temperatures. Differential Scanning calorimetry (DSC) measures the heat capacity, Cₚ, of a molecule (the heat required to warm it, per degree) as a function of temperature. One can use DSC to study the thermal stability of antibodies. DSC data for mAbs is particularly interesting because it sometimes resolves the unfolding of individual domains within the mAb structure, producing up to three peaks in the thermogram (from unfolding of the Fab, C_{H}2, and C_{H}3 domains). Typically unfolding of the Fab domain produces the strongest peak. The DSC profiles and relative stability of the Fc portion show characteristic differences for the human IgG₁, IgG₂, IgG₃, and IgG₄ subclasses (Garber and Demarest, Biochem. Biophys. Res. Commun. 355, 751-757, 2007). One also can determine average apparent melting temperature using circular dichroism (CD), performed with a CD spectrometer. Far-UV CD spectra will be measured for antibodies in the range of 200 to 260 nm at increments of 0.5 nm. The final spectra can be determined as averages of 20 accumulations. Residue ellipticity values can be calculated after background subtraction. Thermal unfolding of antibodies (0.1 mg/mL) can be monitored at 235 nm from 25-95° C. and a heating rate of 1° C./min. One can use dynamic light scattering (DLS) to assess for propensity for aggregation. DLS is used to characterize size of various particles including proteins. If the system is not disperse in size, the mean effective diameter of the particles can be determined. This measurement depends on the size of the particle core, the size of surface structures, and particle concentration. Since DLS essentially measures fluctuations in scattered light intensity due to particles, the diffusion coefficient of the particles can be determined. DLS software in commercial DLA instruments displays the particle population at different diameters. Stability studies can be done conveniently using DLS. DLS measurements of a sample can show whether the particles aggregate over time or with temperature variation by determining whether the hydrodynamic radius of the particle increases. If particles aggregate, one can see a larger population of particles with a larger radius. Stability depending on temperature can be analyzed by controlling the temperature in situ. Capillary electrophoresis (CE) techniques include proven methodologies for determining features of antibody stability. One can use an iCE approach to resolve antibody protein charge variants due to deamidation, C-terminal lysines, sialylation, oxidation, glycosylation, and any other change to the protein that can result in a change in pI of the protein. Each of the expressed antibody proteins can be evaluated by high throughput, free solution isoelectric focusing (IEF) in a capillary column (cIEF), using a Protein Simple Maurice instrument. Whole-column UV absorption detection can be performed every 30 seconds for real time monitoring of molecules focusing at the isoelectric points (pIs). This approach combines the high resolution of traditional gel IEF with the advantages of quantitation and automation found in column-based separations while eliminating the need for a mobilization step. The technique yields reproducible, quantitative analysis of identity, purity, and heterogeneity profiles for the expressed antibodies. The results identify charge heterogeneity and molecular sizing on the antibodies, with both absorbance and native fluorescence detection modes and with sensitivity of detection down to 0.7 μg/mL.

[0128] Solubility. One can determine the intrinsic solubility score of antibody sequences. The intrinsic solubility scores can be calculated using CamSol Intrinsic (Sormanni et al., J Mol Biol 427, 478-490, 2015). The amino acid sequences for residues 95-102 (Kabat numbering) in HCDR3 of each antibody fragment such as a scFv can be evaluated via the online program to calculate the solubility scores. One also can determine solubility using laboratory techniques. Various techniques exist, including addition of lyophilized protein to a solution until the solution becomes saturated and the solubility limit is reached, or concentration by ultrafiltration in a microconcentrator with a suitable molecular weight cut-off. The most straightforward method is induction of amorphous precipitation, which measures protein solubility using a method involving protein precipitation using ammonium sulfate (Trevino et al., J Mol Biol, 366: 449-460, 2007). Ammonium sulfate precipitation gives quick and accurate information on relative solubility values. Ammonium sulfate precipitation produces precipitated solutions with well-defined aqueous and solid phases and requires relatively small amounts of protein. Solubility measurements performed using induction of amorphous precipitation by ammonium sulfate also can be done easily at different pH values. Protein solubility is highly pH dependent, and pH is considered the most important extrinsic factor that affects solubility.

[0129] Autoreactivity. Generally, it is thought that autoreactive clones should be eliminated during ontogeny by negative selection, however it has become clear that many human naturally occurring antibodies with autoreactive properties persist in adult mature repertoires, and the autoreactivity may enhance the antiviral function of many antibodies to pathogens. It has been noted that HCDR3 loops in antibodies during early B cell development are often rich in positive charge and exhibit autoreactive patterns (Wardemann et al., Science 301, 1374-1377, 2003). One can test a given antibody for autoreactivity by assessing the level of binding to human origin cells in microscopy (using adherent HeLa or HEp-2 epithelial cells) and flow cytometric cell surface staining (using suspension Jurkat T cells and 293S human embryonic kidney cells). Autoreactivity also can be surveyed using assessment of binding to tissues in tissue arrays.

[0130] Preferred residues (“Human Likeness”). B cell repertoire deep sequencing of human B cells from blood donors is being performed on a wide scale in many recent studies. Sequence information about a significant portion of the human antibody repertoire facilitates statistical assessment of antibody sequence features common in healthy humans. With knowledge about the antibody sequence features in a human recombined antibody variable gene reference database, the position specific degree of “Human Likeness” (HL) of an antibody sequence can be estimated. HL has been shown to be useful for the development of antibodies in clinical use, like therapeutic antibodies or antibodies as vaccines. The goal is to increase the human likeness of antibodies to reduce potential adverse effects and anti-antibody immune responses that will lead to significantly decreased efficacy of the antibody drug or can induce serious health implications. One can assess antibody characteristics of the combined antibody repertoire of three healthy human blood donors of about 400 million sequences in total and created a novel “relative Human Likeness” (rHL) score that focuses on the hypervariable region of the antibody. The rHL score allows one to easily distinguish between human (positive score) and non-human sequences (negative score). Antibodies can be engineered to eliminate residues that are not common in human repertoires.

[0131] D. Single Chain Antibodies

[0132] A single chain variable fragment (scFv) is a fusion of the variable regions of the heavy and light chains of immunoglobulins, linked together with a short (usually serine, glycine) linker. This chimeric molecule retains the specificity of the original immunoglobulin, despite removal of the constant regions and the introduction of a linker peptide. This modification usually leaves the specificity unaltered. These molecules were created historically to facilitate phage display where it is highly convenient to express the antigen binding domain as a single peptide. Alternatively, scFv can be created directly from subcloned heavy and light chains derived from a hybridoma or B cell. Single chain variable fragments lack the constant Fc region found in complete antibody molecules, and thus, the common binding sites (e.g., protein A/G) used to purify antibodies. These fragments can often be purified/immobilized using Protein L since Protein L interacts with the variable region of kappa light chains.

[0133] Flexible linkers generally are comprised of helix- and turn-promoting amino acid residues such as alanine, serine and glycine. However, other residues can function as well. Tang et al. (1996) used phage display as a means of rapidly selecting tailored linkers for single-chain antibodies (scFvs) from protein linker libraries. A random linker library was constructed in which the genes for the heavy and light chain variable domains were linked by a segment encoding an 18-amino acid polypeptide of variable composition. The scFv repertoire (approx. 5×10⁶ different members) was displayed on filamentous phage and subjected to affinity selection with hapten. The population of selected variants exhibited significant increases in binding activity but retained considerable sequence diversity. Screening 1054 individual variants subsequently yielded a catalytically active scFv that was produced efficiently in soluble form. Sequence analysis revealed a conserved proline in the linker two residues after the V_{H} C terminus and an abundance of arginines and prolines at other positions as the only common features of the selected tethers.

[0134] The recombinant antibodies of the present disclosure may also involve sequences or moieties that permit dimerization or multimerization of the receptors. Such sequences include those derived from IgA, which permit formation of multimers in conjunction with the J-chain. Another multimerization domain is the Gal4 dimerization domain. In other embodiments, the chains may be modified with agents such as biotin/avidin, which permit the combination of two antibodies.

[0135] In a separate embodiment, a single-chain antibody can be created by joining receptor light and heavy chains using a non-peptide linker or chemical unit. Generally, the light and heavy chains will be produced in distinct cells, purified, and subsequently linked together in an appropriate fashion (i.e., the N-terminus of the heavy chain being attached to the C-terminus of the light chain via an appropriate chemical bridge).

[0136] Cross-linking reagents are used to form molecular bridges that tie functional groups of two different molecules, e.g., a stabilizing and coagulating agent. However, it is contemplated that dimers or multimers of the same analog or heteromeric complexes comprised of different analogs can be created. To link two different compounds in a step-wise manner, hetero-bifunctional cross-linkers can be used that eliminate unwanted homopolymer formation.

[0137] An exemplary hetero-bifunctional cross-linker contains two reactive groups: one reacting with primary amine group (e.g., N-hydroxy succinimide) and the other reacting with a thiol group (e.g., pyridyl disulfide, maleimides, halogens, etc.). Through the primary amine reactive group, the cross-linker may react with the lysine residue(s) of one protein (e.g., the selected antibody or fragment) and through the thiol reactive group, the cross-linker, already tied up to the first protein, reacts with the cysteine residue (free sulfhydryl group) of the other protein (e.g., the selective agent).

[0138] It is preferred that a cross-linker having reasonable stability in blood will be employed. Numerous types of disulfide-bond containing linkers are known that can be successfully employed to conjugate targeting and therapeutic/preventative agents. Linkers that contain a disulfide bond that is sterically hindered may prove to give greater stability in vivo, preventing release of the targeting peptide prior to reaching the site of action. These linkers are thus one group of linking agents.

[0139] Another cross-linking reagent is SMPT, which is a bifunctional cross-linker containing a disulfide bond that is “sterically hindered” by an adjacent benzene ring and methyl groups. It is believed that steric hindrance of the disulfide bond serves a function of protecting the bond from attack by thiolate anions such as glutathione which can be present in tissues and blood, and thereby help in preventing decoupling of the conjugate prior to the delivery of the attached agent to the target site.

[0140] The SMPT cross-linking reagent, as with many other known cross-linking reagents, lends the ability to cross-link functional groups such as the SH of cysteine or primary amines (e.g., the epsilon amino group of lysine). Another possible type of cross-linker includes the hetero-bifunctional photoreactive phenylazides containing a cleavable disulfide bond such as sulfosuccinimidyl-2-(p-azido salicylamido) ethyl-1,3′-dithiopropionate. The N-hydroxy-succinimidyl group reacts with primary amino groups and the phenylazide (upon photolysis) reacts non-selectively with any amino acid residue.

[0141] In addition to hindered cross-linkers, non-hindered linkers also can be employed in accordance herewith. Other useful cross-linkers, not considered to contain or generate a protected disulfide, include SATA, SPDP and 2-iminothiolane (Wawrzynczak & Thorpe, 1987). The use of such cross-linkers is well understood in the art. Another embodiment involves the use of flexible linkers.

[0142] U.S. Pat. No. 4,680,338, describes bifunctional linkers useful for producing conjugates of ligands with amine-containing polymers and/or proteins, especially for forming antibody conjugates with chelators, drugs, enzymes, detectable labels and the like. U.S. Pat. Nos. 5,141,648 and 5,563,250 disclose cleavable conjugates containing a labile bond that is cleavable under a variety of mild conditions. This linker is particularly useful in that the agent of interest may be bonded directly to the linker, with cleavage resulting in release of the active agent. Particular uses include adding a free amino or free sulfhydryl group to a protein, such as an antibody, or a drug. U.S. Pat. No. 5,856,456 provides peptide linkers for use in connecting polypeptide constituents to make fusion proteins, e.g., single chain antibodies. The linker is up to about 50 amino acids in length, contains at least one occurrence of a charged amino acid (preferably arginine or lysine) followed by a proline, and is characterized by greater stability and reduced aggregation. U.S. Pat. No. 5,880,270 discloses aminooxy-containing linkers useful in a variety of immunodiagnostic and separative techniques.

[0143] E. Multispecific Antibodies

[0144] In certain embodiments, antibodies of the present disclosure are bispecific or multispecific. Bispecific antibodies are antibodies that have binding specificities for at least two different epitopes. Exemplary bispecific antibodies may bind to two different epitopes of a single antigen. Other such antibodies may combine a first antigen binding site with a binding site for a second antigen. Alternatively, an anti-pathogen arm may be combined with an arm that binds to a triggering molecule on a leukocyte, such as a T-cell receptor molecule (e.g., CD3), or Fc receptors for IgG (FcγR), such as FcγRI (CD64), FcγRII (CD32) and Fc gamma RIII (CD16), so as to focus and localize cellular defense mechanisms to the infected cell. Bispecific antibodies may also be used to localize cytotoxic agents to infected cells. These antibodies possess a pathogen-binding arm and an arm that binds the cytotoxic agent (e.g., saporin, anti-interferon-α, vinca alkaloid, ricin A chain, methotrexate or radioactive isotope hapten). Bispecific antibodies can be prepared as full-length antibodies or antibody fragments (e.g., F(ab′)2 bispecific antibodies). WO 96/16673 describes a bispecific anti-ErbB2/anti-Fc gamma RIII antibody and U.S. Pat. No. 5,837,234 discloses a bispecific anti-ErbB2/anti-Fc gamma RI antibody. A bispecific anti-ErbB2/Fc alpha antibody is shown in WO98/02463. U.S. Pat. No. 5,821,337 teaches a bispecific anti-ErbB2/anti-CD3 antibody.

[0145] Methods for making bispecific antibodies are known in the art. Traditional production of full-length bispecific antibodies is based on the co-expression of two immunoglobulin heavy chain-light chain pairs, where the two chains have different specificities (Millstein et al., Nature, 305:537-539 (1983)). Because of the random assortment of immunoglobulin heavy and light chains, these hybridomas (quadromas) produce a potential mixture of ten different antibody molecules, of which only one has the correct bispecific structure. Purification of the correct molecule, which is usually done by affinity chromatography steps, is rather cumbersome, and the product yields are low. Similar procedures are disclosed in WO 93/08829, and in Traunecker et al., EMBO J., 10:3655-3659 (1991).

[0146] According to a different approach, antibody variable regions with the desired binding specificities (antibody-antigen combining sites) are fused to immunoglobulin constant domain sequences. Preferably, the fusion is with an Ig heavy chain constant domain, comprising at least part of the hinge, C_{H2}, and C_{H3} regions. It is preferred to have the first heavy-chain constant region (C_{H1}) containing the site necessary for light chain bonding, present in at least one of the fusions. DNAs encoding the immunoglobulin heavy chain fusions and, if desired, the immunoglobulin light chain, are inserted into separate expression vectors, and are co-transfected into a suitable host cell. This provides for greater flexibility in adjusting the mutual proportions of the three polypeptide fragments in embodiments when unequal ratios of the three polypeptide chains used in the construction provide the optimum yield of the desired bispecific antibody. It is, however, possible to insert the coding sequences for two or all three polypeptide chains into a single expression vector when the expression of at least two polypeptide chains in equal ratios results in high yields or when the ratios have no significant effect on the yield of the desired chain combination.

[0147] In a particular embodiment of this approach, the bispecific antibodies are composed of a hybrid immunoglobulin heavy chain with a first binding specificity in one arm, and a hybrid immunoglobulin heavy chain-light chain pair (providing a second binding specificity) in the other arm. It was found that this asymmetric structure facilitates the separation of the desired bispecific compound from unwanted immunoglobulin chain combinations, as the presence of an immunoglobulin light chain in only one half of the bispecific molecule provides for a facile way of separation. This approach is disclosed in WO 94/04690. For further details of generating bispecific antibodies see, for example, Suresh et al., Methods in Enzymology, 121:210 (1986).

[0148] According to another approach described in U.S. Pat. No. 5,731,168, the interface between a pair of antibody molecules can be engineered to maximize the percentage of heterodimers that are recovered from recombinant cell culture. The preferred interface comprises at least a part of the C_{H3} domain. In this method, one or more small amino acid side chains from the interface of the first antibody molecule are replaced with larger side chains (e.g., tyrosine or tryptophan). Compensatory “cavities” of identical or similar size to the large side chain(s) are created on the interface of the second antibody molecule by replacing large amino acid side chains with smaller ones (e.g., alanine or threonine). This provides a mechanism for increasing the yield of the heterodimer over other unwanted end-products such as homodimers.

[0149] Bispecific antibodies include cross-linked or “heteroconjugate” antibodies. For example, one of the antibodies in the heteroconjugate can be coupled to avidin, the other to biotin. Such antibodies have, for example, been proposed to target immune system cells to unwanted cells (U.S. Pat. No. 4,676,980), and for treatment of HIV infection (WO 91/00360, WO 92/200373, and EP 03089). Heteroconjugate antibodies may be made using any convenient cross-linking methods. Suitable cross-linking agents are well known in the art, and are disclosed in U.S. Pat. No. 4,676,980, along with a number of cross-linking techniques.

[0150] Techniques for generating bispecific antibodies from antibody fragments have also been described in the literature. For example, bispecific antibodies can be prepared using chemical linkage. Brennan et al., Science, 229: 81 (1985) describe a procedure wherein intact antibodies are proteolytically cleaved to generate F(ab′)2 fragments. These fragments are reduced in the presence of the dithiol complexing agent, sodium arsenite, to stabilize vicinal dithiols and prevent intermolecular disulfide formation. The Fab′ fragments generated are then converted to thionitrobenzoate (TNB) derivatives. One of the Fab′-TNB derivatives is then reconverted to the Fab′-thiol by reduction with mercaptoethylamine and is mixed with an equimolar amount of the other Fab′-TNB derivative to form the bispecific antibody. The bispecific antibodies produced can be used as agents for the selective immobilization of enzymes.

[0151] Techniques exist that facilitate the direct recovery of Fab′-SH fragments from E. coli, which can be chemically coupled to form bispecific antibodies. Shalaby et al., J. Exp. Med., 175: 217-225 (1992) describe the production of a humanized bispecific antibody F(ab′)2 molecule. Each Fab′ fragment was separately secreted from E. coli and subjected to directed chemical coupling in vitro to form the bispecific antibody. The bispecific antibody thus formed was able to bind to cells overexpressing the ErbB2 receptor and normal human T cells, as well as trigger the lytic activity of human cytotoxic lymphocytes against human breast tumor targets.

[0152] Various techniques for making and isolating bispecific antibody fragments directly from recombinant cell culture have also been described (Merchant et al., Nat. Biotechnol, 16, 677-681 (1998), doi:10.1038/nbt0798-677pmid:9661204). For example, bispecific antibodies have been produced using leucine zippers (Kostelny et al., J. Immunol., 148(5):1547-1553, 1992). The leucine zipper peptides from the Fos and Jun proteins were linked to the Fab′ portions of two different antibodies by gene fusion. The antibody homodimers were reduced at the hinge region to form monomers and then re-oxidized to form the antibody heterodimers. This method can also be utilized for the production of antibody homodimers. The “diabody” technology described by Hollinger et al., Proc. Natl. Acad. Sci. USA, 90:6444-6448 (1993) has provided an alternative mechanism for making bispecific antibody fragments. The fragments comprise a V_{H} connected to a V_{L} by a linker that is too short to allow pairing between the two domains on the same chain. Accordingly, the V_{H} and V_{L} domains of one fragment are forced to pair with the complementary V_{L} and V_{H} domains of another fragment, thereby forming two antigen-binding sites. Another strategy for making bispecific antibody fragments by the use of single-chain Fv (sFv) dimers has also been reported. See Gruber et al., J. Immunol., 152:5368 (1994).

[0153] In a particular embodiment, a bispecific or multispecific antibody may be formed as a DOCK-AND-LOCK™ (DML™) complex (see, e.g., U.S. Pat. Nos. 7,521,056; 7,527,787; 7,534,866; 7,550,143 and 7,666,400, the Examples section of each of which is incorporated herein by reference.) Generally, the technique takes advantage of the specific and high-affinity binding interactions that occur between a dimerization and docking domain (DDD) sequence of the regulatory (R) subunits of cAMP-dependent protein kinase (PKA) and an anchor domain (AD) sequence derived from any of a variety of AKAP proteins (Baillie et at, FEBS Letters. 2005; 579: 3264; Wong and Scott, Nat. Rev. Mol. Cell Biol. 2004; 5: 959). The DDD and AD peptides may be attached to any protein, peptide or other molecule. Because the DDD sequences spontaneously, dimerize and bind to the AD sequence, the technique allows the formation of complexes between any selected molecules that may be attached to DDD or AD sequences.

[0154] Antibodies with more than two valencies are contemplated. For example, trispecific antibodies can be prepared (Tutt et al., J. Immunol. 147: 60, 1991; Xu et al., Science, 358(6359):85-90, 2017). A multivalent antibody may be internalized (and/or catabolized) faster than a bivalent antibody by a cell expressing an antigen to which the antibodies bind. The antibodies of the present disclosure can be multivalent antibodies with three or more antigen binding sites (e.g., tetravalent antibodies), which can be readily produced by recombinant expression of nucleic acid encoding the polypeptide chains of the antibody. The multivalent antibody can comprise a dimerization domain and three or more antigen binding sites. The preferred dimerization domain comprises (or consists of) an Fc region or a hinge region. In this scenario, the antibody will comprise an Fc region and three or more antigen binding sites amino-terminal to the Fc region. The preferred multivalent antibody herein comprises (or consists of) three to about eight, but preferably four, antigen binding sites. The multivalent antibody comprises at least one polypeptide chain (and preferably two polypeptide chains), wherein the polypeptide chain(s) comprise two or more variable regions. For instance, the polypeptide chain(s) may comprise VD1-(X1)ₙ-VD2-(X2)ₙ-Fc, wherein VD1 is a first variable region, VD2 is a second variable region, Fc is one polypeptide chain of an Fc region, X1 and X2 represent an amino acid or polypeptide, and n is 0 or 1. For instance, the polypeptide chain(s) may comprise: VH-CH1-flexible linker-VH-CH1-Fc region chain; or VH-CH1-VH-CH1-Fc region chain. The multivalent antibody herein preferably further comprises at least two (and preferably four) light chain variable region polypeptides. The multivalent antibody herein may, for instance, comprise from about two to about eight light chain variable region polypeptides. The light chain variable region polypeptides contemplated here comprise a light chain variable region and, optionally, further comprise a C_{L} domain.

[0155] Charge modifications are particularly useful in the context of a multispecific antibody, where amino acid substitutions in Fab molecules result in reducing the mispairing of light chains with non-matching heavy chains (Bence-Jones-type side products), which can occur in the production of Fab-based bi-/multispecific antigen binding molecules with a VH/VL exchange in one (or more, in case of molecules comprising more than two antigen-binding Fab molecules) of their binding arms (see also PCT publication no. WO 2015/150447, particularly the examples therein, incorporated herein by reference in its entirety).

[0156] Accordingly, in particular embodiments, an antibody comprised in the therapeutic agent comprises
[0157] (a) a first Fab molecule which specifically binds to a first antigen
[0158] (b) a second Fab molecule which specifically binds to a second antigen, and wherein the variable domains VL and VH of the Fab light chain and the Fab heavy chain are replaced by each other,
[0159] wherein the first antigen is an activating T cell antigen and the second antigen is a target cell antigen, or the first antigen is a target cell antigen and the second antigen is an activating T cell antigen; and
[0160] wherein
[0161] i) in the constant domain CL of the first Fab molecule under a) the amino acid at position 124 is substituted by a positively charged amino acid (numbering according to Kabat), and wherein in the constant domain CH1 of the first Fab molecule under a) the amino acid at position 147 or the amino acid at position 213 is substituted by a negatively charged amino acid (numbering according to Kabat EU index); or
[0162] ii) in the constant domain CL of the second Fab molecule under b) the amino acid at position 124 is substituted by a positively charged amino acid (numbering according to Kabat), and wherein in the constant domain CH1 of the second Fab molecule under b) the amino acid at position 147 or the amino acid at position 213 is substituted by a negatively charged amino acid (numbering according to Kabat EU index).
   The antibody may not comprise both modifications mentioned under i) and ii). The constant domains CL and CH1 of the second Fab molecule are not replaced by each other (i.e., remain unexchanged).

[0163] In another embodiment of the antibody, in the constant domain CL of the first Fab molecule under a) the amino acid at position 124 is substituted independently by lysine (K), arginine (R) or histidine (H) (numbering according to Kabat) (in one preferred embodiment independently by lysine (K) or arginine (R)), and in the constant domain CH1 of the first Fab molecule under a) the amino acid at position 147 or the amino acid at position 213 is substituted independently by glutamic acid (E), or aspartic acid (D) (numbering according to Kabat EU index).

[0164] In a further embodiment, in the constant domain CL of the first Fab molecule under a) the amino acid at position 124 is substituted independently by lysine (K), arginine (R) or histidine (H) (numbering according to Kabat), and in the constant domain CH1 of the first Fab molecule under a) the amino acid at position 147 is substituted independently by glutamic acid (E), or aspartic acid (D) (numbering according to Kabat EU index).

[0165] In a particular embodiment, in the constant domain CL of the first Fab molecule under a) the amino acid at position 124 is substituted independently by lysine (K), arginine (R) or histidine (H) (numbering according to Kabat) (in one preferred embodiment independently by lysine (K) or arginine (R)) and the amino acid at position 123 is substituted independently by lysine (K), arginine (R) or histidine (H) (numbering according to Kabat) (in one preferred embodiment independently by lysine (K) or arginine (R)), and in the constant domain CH1 of the first Fab molecule under a) the amino acid at position 147 is substituted independently by glutamic acid (E), or aspartic acid (D) (numbering according to Kabat EU index) and the amino acid at position 213 is substituted independently by glutamic acid (E), or aspartic acid (D) (numbering according to Kabat EU index).

[0166] In a more particular embodiment, in the constant domain CL of the first Fab molecule under a) the amino acid at position 124 is substituted by lysine (K) (numbering according to Kabat) and the amino acid at position 123 is substituted by lysine (K) or arginine (R) (numbering according to Kabat), and in the constant domain CH1 of the first Fab molecule under a) the amino acid at position 147 is substituted by glutamic acid (E) (numbering according to Kabat EU index) and the amino acid at position 213 is substituted by glutamic acid (E) (numbering according to Kabat EU index).

[0167] In an even more particular embodiment, in the constant domain CL of the first Fab molecule under a) the amino acid at position 124 is substituted by lysine (K) (numbering according to Kabat) and the amino acid at position 123 is substituted by arginine (R) (numbering according to Kabat), and in the constant domain CH1 of the first Fab molecule under a) the amino acid at position 147 is substituted by glutamic acid (E) (numbering according to Kabat EU index) and the amino acid at position 213 is substituted by glutamic acid (E) (numbering according to Kabat EU index).

[0168] F. Chimeric Antigen Receptors

[0169] Artificial T cell receptors (also known as chimeric T cell receptors, chimeric immunoreceptors, chimeric antigen receptors (CARs)) are engineered receptors, which graft an arbitrary specificity onto an immune effector cell. Typically, these receptors are used to graft the specificity of a monoclonal antibody onto a T cell, with transfer of their coding sequence facilitated by retroviral vectors. In this way, a large number of target-specific T cells can be generated for adoptive cell transfer. Phase I clinical studies of this approach show efficacy.

[0170] The most common form of these molecules are fusions of single-chain variable fragments (scFv) derived from monoclonal antibodies, fused to CD3-zeta transmembrane and endodomain. Such molecules result in the transmission of a zeta signal in response to recognition by the scFv of its target. An example of such a construct is 14g2a-Zeta, which is a fusion of a scFv derived from hybridoma 14g2a (which recognizes disialoganglioside GD2). When T cells express this molecule (usually achieved by oncoretroviral vector transduction), they recognize and kill target cells that express GD2 (e.g., neuroblastoma cells). To target malignant B cells, investigators have redirected the specificity of T cells using a chimeric immunoreceptor specific for the B-lineage molecule, CD19.

[0171] The variable portions of an immunoglobulin heavy and light chain are fused by a flexible linker to form a scFv. This scFv is preceded by a signal peptide to direct the nascent protein to the endoplasmic reticulum and subsequent surface expression (this is cleaved). A flexible spacer allows to the scFv to orient in different directions to enable antigen binding. The transmembrane domain is a typical hydrophobic alpha helix usually derived from the original molecule of the signaling endodomain which protrudes into the cell and transmits the desired signal.

[0172] Type I proteins are in fact two protein domains linked by a transmembrane alpha helix in between. The cell membrane lipid bilayer, through which the transmembrane domain passes, acts to isolate the inside portion (endodomain) from the external portion (ectodomain). It is not so surprising that attaching an ectodomain from one protein to an endodomain of another protein results in a molecule that combines the recognition of the former to the signal of the latter.

[0173] Ectodomain. A signal peptide directs the nascent protein into the endoplasmic reticulum. This is essential if the receptor is to be glycosylated and anchored in the cell membrane. Any eukaryotic signal peptide sequence usually works fine. Generally, the signal peptide natively attached to the amino-terminal most component is used (e.g., in a scFv with orientation light chain -linker- heavy chain, the native signal of the light-chain is used

[0174] The antigen recognition domain is usually an scFv. There are however many alternatives. An antigen recognition domain from native T-cell receptor (TCR) alpha and beta single chains have been described, as have simple ectodomains (e.g., CD4 ectodomain to recognize HIV infected cells) and more exotic recognition components such as a linked cytokine (which leads to recognition of cells bearing the cytokine receptor). In fact, almost anything that binds a given target with high affinity can be used as an antigen recognition region.

[0175] A spacer region links the antigen binding domain to the transmembrane domain. It should be flexible enough to allow the antigen binding domain to orient in different directions to facilitate antigen recognition. The simplest form is the hinge region from IgG1. Alternatives include the CH₂CH₃ region of immunoglobulin and portions of CD3. For most scFv based constructs, the IgG1 hinge suffices. However, the best spacer often has to be determined empirically.

[0176] Transmembrane domain. The transmembrane domain is a hydrophobic alpha helix that spans the membrane. Generally, the transmembrane domain from the most membrane proximal component of the endodomain is used. Interestingly, using the CD3-zeta transmembrane domain may result in incorporation of the artificial TCR into the native TCR a factor that is dependent on the presence of the native CD3-zeta transmembrane charged aspartic acid residue. Different transmembrane domains result in different receptor stability. The CD28 transmembrane domain results in a brightly expressed, stable receptor.

[0177] Endodomain. This is the “business-end” of the receptor. After antigen recognition, receptors cluster and a signal is transmitted to the cell. The most commonly used endodomain component is CD3-zeta which contains 3 ITAMs. This transmits an activation signal to the T cell after antigen is bound. CD3-zeta may not provide a fully competent activation signal and additional co-stimulatory signaling is needed.

[0178] “First-generation” CARs typically had the intracellular domain from the CD3 ξ-chain, which is the primary transmitter of signals from endogenous TCRs. “Second-generation” CARs add intracellular signaling domains from various costimulatory protein receptors (e.g., CD28, 41BB, ICOS) to the cytoplasmic tail of the CAR to provide additional signals to the T cell. Preclinical studies have indicated that the second generation of CAR designs improves the antitumor activity of T cells. More recent, “third-generation” CARs combine multiple signaling domains, such as CD3z-CD28-41BB or CD3z-CD28-OX40, to further augment potency.

[0179] G. ADCs

[0180] Antibody Drug Conjugates or ADCs are a new class of highly potent biopharmaceutical drugs designed as a targeted therapy for the treatment of people with infectious disease. ADCs are complex molecules composed of an antibody (a whole mAb or an antibody fragment such as a single-chain variable fragment, or scFv) linked, via a stable chemical linker with labile bonds, to a biological active cytotoxic/anti-viral payload or drug. Antibody Drug Conjugates are examples of bioconjugates and immunoconjugates.

[0181] By combining the unique targeting capabilities of monoclonal antibodies with the cancer-killing ability of cytotoxic drugs, antibody-drug conjugates allow sensitive discrimination between healthy and diseased tissue. This means that, in contrast to traditional systemic approaches, antibody-drug conjugates target and attack the infected cell so that healthy cells are less severely affected.

[0182] In the development ADC-based anti-tumor therapies, an anticancer drug (e.g., a cell toxin or cytotoxin) is coupled to an antibody that specifically targets a certain cell marker (e.g., a protein that, ideally, is only to be found in or on infected cells). Antibodies track these proteins down in the body and attach themselves to the surface of cancer cells. The biochemical reaction between the antibody and the target protein (antigen) triggers a signal in the tumor cell, which then absorbs or internalizes the antibody together with the cytotoxin. After the ADC is internalized, the cytotoxic drug is released and kills the cell or impairs viral replication. Due to this targeting, ideally the drug has lower side effects and gives a wider therapeutic window than other agents.

[0183] A stable link between the antibody and cytotoxic/anti-viral agent is a crucial aspect of an ADC. Linkers are based on chemical motifs including disulfides, hydrazones or peptides (cleavable), or thioethers (noncleavable) and control the distribution and delivery of the cytotoxic agent to the target cell. Cleavable and noncleavable types of linkers have been proven to be safe in preclinical and clinical trials. Brentuximab vedotin includes an enzyme-sensitive cleavable linker that delivers the potent and highly toxic antimicrotubule agent Monomethyl auristatin E or MMAE, a synthetic antineoplastic agent, to human specific CD30-positive malignant cells. Because of its high toxicity MMAE, which inhibits cell division by blocking the polymerization of tubulin, cannot be used as a single-agent chemotherapeutic drug. However, the combination of MMAE linked to an anti-CD30 monoclonal antibody (cAC10, a cell membrane protein of the tumor necrosis factor or TNF receptor) proved to be stable in extracellular fluid, cleavable by cathepsin and safe for therapy. Trastuzumab emtansine, the other approved ADC, is a combination of the microtubule-formation inhibitor mertansine (DM-1), a derivative of the Maytansine, and antibody trastuzumab (Herceptin®/Genentech/Roche) attached by a stable, non-cleavable linker. The availability of better and more stable linkers has changed the function of the chemical bond. The type of linker, cleavable or noncleavable, lends specific properties to the cytotoxic (anti-cancer) drug. For example, a non-cleavable linker keeps the drug within the cell. As a result, the entire antibody, linker and cytotoxic agent enter the targeted cancer cell where the antibody is degraded to the level of an amino acid. The resulting complex—amino acid, linker and cytotoxic agent—now becomes the active drug. In contrast, cleavable linkers are catalyzed by enzymes in the host cell where it releases the cytotoxic agent.

[0184] Another type of cleavable linker, currently in development, adds an extra molecule between the cytotoxic/anti-viral drug and the cleavage site. This linker technology allows researchers to create ADCs with more flexibility without worrying about changing cleavage kinetics. Researchers are also developing a new method of peptide cleavage based on Edman degradation, a method of sequencing amino acids in a peptide. Future direction in the development of ADCs also include the development of site-specific conjugation (TDCs) to further improve stability and therapeutic index and a emitting immunoconjugates and antibody-conjugated nanoparticles.

[0185] H. BiTES

[0186] Bi-specific T-cell engagers (BiTEs) are a class of artificial bispecific monoclonal antibodies that are investigated for the use as anti-cancer drugs. They direct a host's immune system, more specifically the T cells' cytotoxic activity, against infected cells. BiTE is a registered trademark of Micromet AG.

[0187] BiTEs are fusion proteins consisting of two single-chain variable fragments (scFvs) of different antibodies, or amino acid sequences from four different genes, on a single peptide chain of about 55 kilodaltons. One of the scFvs binds to T cells via the CD3 receptor, and the other to an infected cell via a specific molecule.

[0188] Like other bispecific antibodies, and unlike ordinary monoclonal antibodies, BiTEs form a link between T cells and target cells. This causes T cells to exert cytotoxic/anti-viral activity on infected cells by producing proteins like perform and granzymes, independently of the presence of MHC I or co-stimulatory molecules. These proteins enter infected cells and initiate the cell's apoptosis. This action mimics physiological processes observed during T cell attacks against infected cells.

[0189] I. Intrabodies

[0190] In a particular embodiment, the antibody is a recombinant antibody that is suitable for action inside of a cell—such antibodies are known as “intrabodies.” These antibodies may interfere with target function by a variety of mechanism, such as by altering intracellular protein trafficking, interfering with enzymatic function, and blocking protein-protein or protein-DNA interactions. In many ways, their structures mimic or parallel those of single chain and single domain antibodies, discussed above. Indeed, single-transcript/single-chain is an important feature that permits intracellular expression in a target cell, and also makes protein transit across cell membranes more feasible. However, additional features are required.

[0191] The two major issues impacting the implementation of intrabody therapeutic are delivery, including cell/tissue targeting, and stability. With respect to delivery, a variety of approaches have been employed, such as tissue-directed delivery, use of cell-type specific promoters, viral-based delivery and use of cell-permeability/membrane translocating peptides. With respect to the stability, the approach is generally to either screen by brute force, including methods that involve phage display and may include sequence maturation or development of consensus sequences, or more directed modifications such as insertion stabilizing sequences (e.g., Fc regions, chaperone protein sequences, leucine zippers) and disulfide replacement/modification.

[0192] An additional feature that intrabodies may require is a signal for intracellular targeting. Vectors that can target intrabodies (or other proteins) to subcellular regions such as the cytoplasm, nucleus, mitochondria and ER have been designed and are commercially available (Invitrogen Corp.; Persic et al., 1997).

[0193] By virtue of their ability to enter cells, intrabodies have additional uses that other types of antibodies may not achieve. In the case of the present antibodies, the ability to interact with the MUC1 cytoplasmic domain in a living cell may interfere with functions associated with the MUC1 CD, such as signaling functions (binding to other molecules) or oligomer formation. In particular, it is contemplated that such antibodies can be used to inhibit MUC1 dimer formation.

[0194] J. Purification

[0195] In certain embodiments, the antibodies of the present disclosure may be purified. The term “purified,” as used herein, is intended to refer to a composition, isolatable from other components, wherein the protein is purified to any degree relative to its naturally-obtainable state. A purified protein therefore also refers to a protein, free from the environment in which it may naturally occur. Where the term “substantially purified” is used, this designation will refer to a composition in which the protein or peptide forms the major component of the composition, such as constituting about 50%, about 60%, about 70%, about 80%, about 90%, about 95% or more of the proteins in the composition.

[0196] Protein purification techniques are well known to those of skill in the art. These techniques involve, at one level, the crude fractionation of the cellular milieu to polypeptide and non-polypeptide fractions. Having separated the polypeptide from other proteins, the polypeptide of interest may be further purified using chromatographic and electrophoretic techniques to achieve partial or complete purification (or purification to homogeneity). Analytical methods particularly suited to the preparation of a pure peptide are ion-exchange chromatography, exclusion chromatography; polyacrylamide gel electrophoresis; isoelectric focusing. Other methods for protein purification include, precipitation with ammonium sulfate, PEG, antibodies and the like or by heat denaturation, followed by centrifugation; gel filtration, reverse phase, hydroxylapatite and affinity chromatography; and combinations of such and other techniques.

[0197] In purifying an antibody of the present disclosure, it may be desirable to express the polypeptide in a prokaryotic or eukaryotic expression system and extract the protein using denaturing conditions. The polypeptide may be purified from other cellular components using an affinity column, which binds to a tagged portion of the polypeptide. As is generally known in the art, it is believed that the order of conducting the various purification steps may be changed, or that certain steps may be omitted, and still result in a suitable method for the preparation of a substantially purified protein or peptide.

[0198] Commonly, complete antibodies are fractionated utilizing agents (i.e., protein A) that bind the Fc portion of the antibody. Alternatively, antigens may be used to simultaneously purify and select appropriate antibodies. Such methods often utilize the selection agent bound to a support, such as a column, filter or bead. The antibodies are bound to a support, contaminants removed (e.g., washed away), and the antibodies released by applying conditions (salt, heat, etc.).

[0199] Various methods for quantifying the degree of purification of the protein or peptide will be known to those of skill in the art in light of the present disclosure. These include, for example, determining the specific activity of an active fraction, or assessing the amount of polypeptides within a fraction by SDS/PAGE analysis. Another method for assessing the purity of a fraction is to calculate the specific activity of the fraction, to compare it to the specific activity of the initial extract, and to thus calculate the degree of purity. The actual units used to represent the amount of activity will, of course, be dependent upon the particular assay technique chosen to follow the purification and whether or not the expressed protein or peptide exhibits a detectable activity.

[0200] It is known that the migration of a polypeptide can vary, sometimes significantly, with different conditions of SDS/PAGE (Capaldi et al., 1977). It will therefore be appreciated that under differing electrophoresis conditions, the apparent molecular weights of purified or partially purified expression products may vary.

### III. ACTIVE/PASSIVE IMMUNIZATION AND TREATMENT/PREVENTION OF SARS-CoV-2 INFECTION

[0201] A. Formulation and Administration

[0202] The present disclosure provides pharmaceutical compositions comprising anti-SARS-CoV-2 virus antibodies and antigens for generating the same. Such compositions comprise a prophylactically or therapeutically effective amount of an antibody or a fragment thereof, or a peptide immunogen, and a pharmaceutically acceptable carrier. In a specific embodiment, the term “pharmaceutically acceptable” means approved by a regulatory agency of the Federal or a state government or listed in the U.S. Pharmacopeia or other generally recognized pharmacopeia for use in animals, and more particularly in humans. The term “carrier” refers to a diluent, excipient, or vehicle with which the therapeutic is administered. Such pharmaceutical carriers can be sterile liquids, such as water and oils, including those of petroleum, animal, vegetable or synthetic origin, such as peanut oil, soybean oil, mineral oil, sesame oil and the like. Water is a particular carrier when the pharmaceutical composition is administered intravenously. Saline solutions and aqueous dextrose and glycerol solutions can also be employed as liquid carriers, particularly for injectable solutions. Other suitable pharmaceutical excipients include starch, glucose, lactose, sucrose, gelatin, malt, rice, flour, chalk, silica gel, sodium stearate, glycerol monostearate, talc, sodium chloride, dried skim milk, glycerol, propylene, glycol, water, ethanol and the like.

[0203] The composition, if desired, can also contain minor amounts of wetting or emulsifying agents, or pH buffering agents. These compositions can take the form of solutions, suspensions, emulsion, tablets, pills, capsules, powders, sustained-release formulations and the like. Oral formulations can include standard carriers such as pharmaceutical grades of mannitol, lactose, starch, magnesium stearate, sodium saccharine, cellulose, magnesium carbonate, etc. Examples of suitable pharmaceutical agents are described in “Remington's Pharmaceutical Sciences.” Such compositions will contain a prophylactically or therapeutically effective amount of the antibody or fragment thereof, preferably in purified form, together with a suitable amount of carrier so as to provide the form for proper administration to the patient. The formulation should suit the mode of administration, which can be oral, intravenous, intraarterial, intrabuccal, intranasal, nebulized, bronchial inhalation, intra-rectal, vaginal, topical or delivered by mechanical ventilation.

[0204] Active vaccines are also envisioned where antibodies like those disclosed are produced in vivo in a subject at risk of SARS-CoV-2 infection. Such vaccines can be formulated for parenteral administration, e.g., formulated for injection via the intradermal, intravenous, intramuscular, subcutaneous, or even intraperitoneal routes. Administration by intradermal and intramuscular routes are contemplated. The vaccine could alternatively be administered by a topical route directly to the mucosa, for example, by nasal drops, inhalation, by nebulizer, or via intrarectal or vaginal delivery. Pharmaceutically acceptable salts include the acid salts and those which are formed with inorganic acids such as, for example, hydrochloric or phosphoric acids, or such organic acids as acetic, oxalic, tartaric, mandelic, and the like. Salts formed with the free carboxyl groups may also be derived from inorganic bases such as, for example, sodium, potassium, ammonium, calcium, or ferric hydroxides, and such organic bases as isopropylamine, trimethylamine, 2-ethylamino ethanol, histidine, procaine, and the like.

[0205] Passive transfer of antibodies, known as artificially acquired passive immunity, generally will involve the use of intravenous or intramuscular injections. The forms of antibody can be human or animal blood plasma or serum, as pooled human immunoglobulin for intravenous (IVIG) or intramuscular (IG) use, as high-titer human IVIG or IG from immunized or from donors recovering from disease, and as monoclonal antibodies (MAb). Such immunity generally lasts for only a short period of time, and there is also a potential risk for hypersensitivity reactions, and serum sickness, especially from gamma globulin of non-human origin. However, passive immunity provides immediate protection. The antibodies will be formulated in a carrier suitable for injection, i.e., sterile and syringeable.

[0206] Generally, the ingredients of compositions of the disclosure are supplied either separately or mixed together in unit dosage form, for example, as a dry lyophilized powder or water-free concentrate in a hermetically sealed container such as an ampoule or sachette indicating the quantity of active agent. Where the composition is to be administered by infusion, it can be dispensed with an infusion bottle containing sterile pharmaceutical grade water or saline. Where the composition is administered by injection, an ampoule of sterile water for injection or saline can be provided so that the ingredients may be mixed prior to administration.

[0207] The compositions of the disclosure can be formulated as neutral or salt forms. Pharmaceutically acceptable salts include those formed with anions such as those derived from hydrochloric, phosphoric, acetic, oxalic, tartaric acids, etc., and those formed with cations such as those derived from sodium, potassium, ammonium, calcium, ferric hydroxides, isopropylamine, triethylamine, 2-ethylamino ethanol, histidine, procaine, etc.

[0208] 2. ADCC

[0209] Antibody-dependent cell-mediated cytotoxicity (ADCC) is an immune mechanism leading to the lysis of antibody-coated target cells by immune effector cells. The target cells are cells to which antibodies or fragments thereof comprising an Fc region specifically bind, generally via the protein part that is N-terminal to the Fc region. By “antibody having increased/reduced antibody dependent cell-mediated cytotoxicity (ADCC)” is meant an antibody having increased/reduced ADCC as determined by any suitable method known to those of ordinary skill in the art.

[0210] As used herein, the term “increased/reduced ADCC” is defined as either an increase/reduction in the number of target cells that are lysed in a given time, at a given concentration of antibody in the medium surrounding the target cells, by the mechanism of ADCC defined above, and/or a reduction/increase in the concentration of antibody, in the medium surrounding the target cells, required to achieve the lysis of a given number of target cells in a given time, by the mechanism of ADCC. The increase/reduction in ADCC is relative to the ADCC mediated by the same antibody produced by the same type of host cells, using the same standard production, purification, formulation and storage methods (which are known to those skilled in the art), but that has not been engineered. For example, the increase in ADCC mediated by an antibody produced by host cells engineered to have an altered pattern of glycosylation (e.g., to express the glycosyltransferase, GnTIII, or other glycosyltransferases) by the methods described herein, is relative to the ADCC mediated by the same antibody produced by the same type of non-engineered host cells.

[0211] 3. CDC

[0212] Complement-dependent cytotoxicity (CDC) is a function of the complement system. It is the processes in the immune system that kill pathogens by damaging their membranes without the involvement of antibodies or cells of the immune system. There are three main processes. All three insert one or more membrane attack complexes (MAC) into the pathogen which cause lethal colloid-osmotic swelling, i.e., CDC. It is one of the mechanisms by which antibodies or antibody fragments have an anti-viral effect.

### IV. ANTIBODY CONJUGATES

[0213] Antibodies of the present disclosure may be linked to at least one agent to form an antibody conjugate. In order to increase the efficacy of antibody molecules as diagnostic or therapeutic agents, it is conventional to link or covalently bind or complex at least one desired molecule or moiety. Such a molecule or moiety may be, but is not limited to, at least one effector or reporter molecule. Effector molecules comprise molecules having a desired activity, e.g., cytotoxic activity. Non-limiting examples of effector molecules which have been attached to antibodies include toxins, anti-tumor agents, therapeutic enzymes, radionuclides, antiviral agents, chelating agents, cytokines, growth factors, and oligo- or polynucleotides. By contrast, a reporter molecule is defined as any moiety which may be detected using an assay. Non-limiting examples of reporter molecules which have been conjugated to antibodies include enzymes, radiolabels, haptens, fluorescent labels, phosphorescent molecules, chemiluminescent molecules, chromophores, photoaffinity molecules, colored particles or ligands, such as biotin.

[0214] Antibody conjugates are generally preferred for use as diagnostic agents. Antibody diagnostics generally fall within two classes, those for use in in vitro diagnostics, such as in a variety of immunoassays, and those for use in vivo diagnostic protocols, generally known as “antibody-directed imaging.” Many appropriate imaging agents are known in the art, as are methods for their attachment to antibodies (see, for e.g., U.S. Pat. Nos. 5,021,236, 4,938,948, and 4,472,509). The imaging moieties used can be paramagnetic ions, radioactive isotopes, fluorochromes, NMR-detectable substances, and X-ray imaging agents.

[0215] In the case of paramagnetic ions, one might mention by way of example ions such as chromium (III), manganese (II), iron (III), iron (II), cobalt (II), nickel (II), copper (II), neodymium (III), samarium (III), ytterbium (III), gadolinium (III), vanadium (II), terbium (III), dysprosium (III), holmium (III) and/or erbium (III), with gadolinium being particularly preferred. Ions useful in other contexts, such as X-ray imaging, include but are not limited to lanthanum (III), gold (III), lead (II), and especially bismuth (III).

[0216] In the case of radioactive isotopes for therapeutic and/or diagnostic application, one might mention astatine²¹¹, ¹⁴carbon, ⁵¹chromium, ³⁶chlorine, ⁵⁷cobalt, ⁵⁸cobalt, copper⁶⁷, ¹⁵²Eu, gallium⁶⁷, ³hydrogen, iodine¹²³, iodine¹²⁵, iodine¹³¹, indium¹¹¹, ⁵⁹iron, ³²phosphorus, rhenium¹⁸⁶, rhenium¹⁸⁸, ⁷⁵selenium, ³⁵sulphur, technicium^{99m} and/or yttrium⁹⁰. ¹²⁵I is often being preferred for use in certain embodiments, and technicium^{99m} and/or indium¹¹¹ are also often preferred due to their low energy and suitability for long range detection. Radioactively labeled monoclonal antibodies of the present disclosure may be produced according to well-known methods in the art. For instance, monoclonal antibodies can be iodinated by contact with sodium and/or potassium iodide and a chemical oxidizing agent such as sodium hypochlorite, or an enzymatic oxidizing agent, such as lactoperoxidase. Monoclonal antibodies according to the disclosure may be labeled with technetium^{99m} by ligand exchange process, for example, by reducing pertechnate with stannous solution, chelating the reduced technetium onto a Sephadex column and applying the antibody to this column. Alternatively, direct labeling techniques may be used, e.g., by incubating pertechnate, a reducing agent such as SNCl₂, a buffer solution such as sodium-potassium phthalate solution, and the antibody. Intermediary functional groups which are often used to bind radioisotopes which exist as metallic ions to antibody are diethylenetriaminepentaacetic acid (DTPA) or ethylene diaminetetracetic acid (EDTA).

[0217] Among the fluorescent labels contemplated for use as conjugates include Alexa 350, Alexa 430, AMCA, BODIPY 630/650, BODIPY 650/665, BODIPY-FL, BODIPY-R6G, BODIPY-TMR, BODIPY-TRX, Cascade Blue, Cy3, Cy5,6-FAM, Fluorescein Isothiocyanate, HEX, 6-JOE, Oregon Green 488, Oregon Green 500, Oregon Green 514, Pacific Blue, REG, Rhodamine Green, Rhodamine Red, Renographin, ROX, TAMRA, TET, Tetramethylrhodamine, and/or Texas Red.

[0218] Additional types of antibodies contemplated in the present disclosure are those intended primarily for use in vitro, where the antibody is linked to a secondary binding ligand and/or to an enzyme (an enzyme tag) that will generate a colored product upon contact with a chromogenic substrate. Examples of suitable enzymes include urease, alkaline phosphatase, (horseradish) hydrogen peroxidase or glucose oxidase. Preferred secondary binding ligands are biotin and avidin and streptavidin compounds. The use of such labels is well known to those of skill in the art and are described, for example, in U.S. Pat. Nos. 3,817,837, 3,850,752, 3,939,350, 3,996,345, 4,277,437, 4,275,149 and 4,366,241.

[0219] Yet another known method of site-specific attachment of molecules to antibodies comprises the reaction of antibodies with hapten-based affinity labels. Essentially, hapten-based affinity labels react with amino acids in the antigen binding site, thereby destroying this site and blocking specific antigen reaction. However, this may not be advantageous since it results in loss of antigen binding by the antibody conjugate.

[0220] Molecules containing azido groups may also be used to form covalent bonds to proteins through reactive nitrene intermediates that are generated by low intensity ultraviolet light (Potter and Haley, 1983). In particular, 2- and 8-azido analogues of purine nucleotides have been used as site-directed photoprobes to identify nucleotide binding proteins in crude cell extracts (Owens & Haley, 1987; Atherton et al., 1985). The 2- and 8-azido nucleotides have also been used to map nucleotide binding domains of purified proteins (Khatoon et al., 1989; King et al., 1989; Dholakia et al., 1989) and may be used as antibody binding agents.

[0221] Several methods are known in the art for the attachment or conjugation of an antibody to its conjugate moiety. Some attachment methods involve the use of a metal chelate complex employing, for example, an organic chelating agent such a diethylenetriaminepentaacetic acid anhydride (DTPA); ethylenetriaminetetraacetic acid; N-chloro-p-toluenesulfonamide; and/or tetrachloro-3α-6α-diphenylglycouril-3 attached to the antibody (U.S. Pat. Nos. 4,472,509 and 4,938,948). Monoclonal antibodies may also be reacted with an enzyme in the presence of a coupling agent such as glutaraldehyde or periodate. Conjugates with fluorescein markers are prepared in the presence of these coupling agents or by reaction with an isothiocyanate. In U.S. Pat. No. 4,938,948, imaging of breast tumors is achieved using monoclonal antibodies and the detectable imaging moieties are bound to the antibody using linkers such as methyl-p-hydroxybenzimidate or N-succinimidyl-3-(4-hydroxyphenyl)propionate.

[0222] In other embodiments, derivatization of immunoglobulins by selectively introducing sulfhydryl groups in the Fc region of an immunoglobulin, using reaction conditions that do not alter the antibody combining site are contemplated. Antibody conjugates produced according to this methodology are disclosed to exhibit improved longevity, specificity and sensitivity (U.S. Pat. No. 5,196,066, incorporated herein by reference). Site-specific attachment of effector or reporter molecules, wherein the reporter or effector molecule is conjugated to a carbohydrate residue in the Fc region have also been disclosed in the literature (O'Shannessy et al., 1987). This approach has been reported to produce diagnostically and therapeutically promising antibodies which are currently in clinical evaluation.

### V. IMMUNODETECTION METHODS

[0223] In still further embodiments, the present disclosure concerns immunodetection methods for binding, purifying, removing, quantifying and otherwise generally detecting SARS-CoV-2 and its associated antigens. While such methods can be applied in a traditional sense, another use will be in quality control and monitoring of vaccine and other virus stocks, where antibodies according to the present disclosure can be used to assess the amount or integrity (i.e., long term stability) of antigens in viruses. Alternatively, the methods may be used to screen various antibodies for appropriate/desired reactivity profiles.

[0224] Other immunodetection methods include specific assays for determining the presence of SARS-CoV-2 in a subject. A wide variety of assay formats are contemplated, but specifically those that would be used to detect SARS-CoV-2 in a fluid obtained from a subject, such as saliva, blood, plasma, sputum, semen or urine. In particular, semen has been demonstrated as a viable sample for detecting SARS-CoV-2 (Purpura et al., 2016; Mansuy et al., 2016; Barzon et al., 2016; Gornet et al., 2016; Duffy et al., 2009; CDC, 2016; Halfon et al., 2010; Elder et al. 2005). The assays may be advantageously formatted for non-healthcare (home) use, including lateral flow assays (see below) analogous to home pregnancy tests. These assays may be packaged in the form of a kit with appropriate reagents and instructions to permit use by the subject of a family member.

[0225] Some immunodetection methods include enzyme linked immunosorbent assay (ELISA), radioimmunoassay (RIA), immunoradiometric assay, fluoroimmunoassay, chemiluminescent assay, bioluminescent assay, and Western blot to mention a few. In particular, a competitive assay for the detection and quantitation of SARS-CoV-2 antibodies directed to specific parasite epitopes in samples also is provided. The steps of various useful immunodetection methods have been described in the scientific literature, such as, e.g., Doolittle and Ben-Zeev (1999), Gulbis and Galand (1993), De Jager et al. (1993), and Nakamura et al. (1987). In general, the immunobinding methods include obtaining a sample suspected of containing SARS-CoV-2, and contacting the sample with a first antibody in accordance with the present disclosure, as the case may be, under conditions effective to allow the formation of immunocomplexes.

[0226] These methods include methods for purifying SARS-CoV-2 or related antigens from a sample. The antibody will preferably be linked to a solid support, such as in the form of a column matrix, and the sample suspected of containing the SARS-CoV-2 or antigenic component will be applied to the immobilized antibody. The unwanted components will be washed from the column, leaving the SARS-CoV-2 antigen immunocomplexed to the immobilized antibody, which is then collected by removing the organism or antigen from the column.

[0227] The immunobinding methods also include methods for detecting and quantifying the amount of SARS-CoV-2 or related components in a sample and the detection and quantification of any immune complexes formed during the binding process. Here, one would obtain a sample suspected of containing SARS-CoV-2 or its antigens and contact the sample with an antibody that binds SARS-CoV-2 or components thereof, followed by detecting and quantifying the amount of immune complexes formed under the specific conditions. In terms of antigen detection, the biological sample analyzed may be any sample that is suspected of containing SARS-CoV-2 or SARS-CoV-2 antigen, such as a tissue section or specimen, a homogenized tissue extract, a biological fluid, including blood and serum, or a secretion, such as feces or urine.

[0228] Contacting the chosen biological sample with the antibody under effective conditions and for a period of time sufficient to allow the formation of immune complexes (primary immune complexes) is generally a matter of simply adding the antibody composition to the sample and incubating the mixture for a period of time long enough for the antibodies to form immune complexes with, i.e., to bind to SARS-CoV-2 or antigens present. After this time, the sample-antibody composition, such as a tissue section, ELISA plate, dot blot or Western blot, will generally be washed to remove any non-specifically bound antibody species, allowing only those antibodies specifically bound within the primary immune complexes to be detected.

[0229] In general, the detection of immunocomplex formation is well known in the art and may be achieved through the application of numerous approaches. These methods are generally based upon the detection of a label or marker, such as any of those radioactive, fluorescent, biological and enzymatic tags. Patents concerning the use of such labels include U.S. Pat. Nos. 3,817,837, 3,850,752, 3,939,350, 3,996,345, 4,277,437, 4,275,149 and 4,366,241. Of course, one may find additional advantages through the use of a secondary binding ligand such as a second antibody and/or a biotin/avidin ligand binding arrangement, as is known in the art.

[0230] The antibody employed in the detection may itself be linked to a detectable label, wherein one would then simply detect this label, thereby allowing the amount of the primary immune complexes in the composition to be determined. Alternatively, the first antibody that becomes bound within the primary immune complexes may be detected by means of a second binding ligand that has binding affinity for the antibody. In these cases, the second binding ligand may be linked to a detectable label. The second binding ligand is itself often an antibody, which may thus be termed a “secondary” antibody. The primary immune complexes are contacted with the labeled, secondary binding ligand, or antibody, under effective conditions and for a period of time sufficient to allow the formation of secondary immune complexes. The secondary immune complexes are then generally washed to remove any non-specifically bound labeled secondary antibodies or ligands, and the remaining label in the secondary immune complexes is then detected.

[0231] Further methods include the detection of primary immune complexes by a two-step approach. A second binding ligand, such as an antibody that has binding affinity for the antibody, is used to form secondary immune complexes, as described above. After washing, the secondary immune complexes are contacted with a third binding ligand or antibody that has binding affinity for the second antibody, again under effective conditions and for a period of time sufficient to allow the formation of immune complexes (tertiary immune complexes). The third ligand or antibody is linked to a detectable label, allowing detection of the tertiary immune complexes thus formed. This system may provide for signal amplification if this is desired.

[0232] One method of immunodetection uses two different antibodies. A first biotinylated antibody is used to detect the target antigen, and a second antibody is then used to detect the biotin attached to the complexed biotin. In that method, the sample to be tested is first incubated in a solution containing the first step antibody. If the target antigen is present, some of the antibody binds to the antigen to form a biotinylated antibody/antigen complex. The antibody/antigen complex is then amplified by incubation in successive solutions of streptavidin (or avidin), biotinylated DNA, and/or complementary biotinylated DNA, with each step adding additional biotin sites to the antibody/antigen complex. The amplification steps are repeated until a suitable level of amplification is achieved, at which point the sample is incubated in a solution containing the second step antibody against biotin. This second step antibody is labeled, for example, with an enzyme that can be used to detect the presence of the antibody/antigen complex by histoenzymology using a chromogen substrate. With suitable amplification, a conjugate can be produced which is macroscopically visible.

[0233] Another known method of immunodetection takes advantage of the immuno-PCR (Polymerase Chain Reaction) methodology. The PCR method is similar to the Cantor method up to the incubation with biotinylated DNA, however, instead of using multiple rounds of streptavidin and biotinylated DNA incubation, the DNA/biotin/streptavidin/antibody complex is washed out with a low pH or high salt buffer that releases the antibody. The resulting wash solution is then used to carry out a PCR reaction with suitable primers with appropriate controls. At least in theory, the enormous amplification capability and specificity of PCR can be utilized to detect a single antigen molecule.

[0234] A. ELISAs

[0235] Immunoassays, in their most simple and direct sense, are binding assays. Certain preferred immunoassays are the various types of enzyme linked immunosorbent assays (ELISAs) and radioimmunoassays (RIA) known in the art. Immunohistochemical detection using tissue sections is also particularly useful. However, it will be readily appreciated that detection is not limited to such techniques, and western blotting, dot blotting, FACS analyses, and the like may also be used.

[0236] In one exemplary ELISA, the antibodies of the disclosure are immobilized onto a selected surface exhibiting protein affinity, such as a well in a polystyrene microtiter plate. Then, a test composition suspected of containing the SARS-CoV-2 or SARS-CoV-2 antigen is added to the wells. After binding and washing to remove non-specifically bound immune complexes, the bound antigen may be detected. Detection may be achieved by the addition of another anti-SARS-CoV-2 antibody that is linked to a detectable label. This type of ELISA is a simple “sandwich ELISA.” Detection may also be achieved by the addition of a second anti-SARS-CoV-2 antibody, followed by the addition of a third antibody that has binding affinity for the second antibody, with the third antibody being linked to a detectable label.

[0237] In another exemplary ELISA, the samples suspected of containing the SARS-CoV-2 or SARS-CoV-2 antigen are immobilized onto the well surface and then contacted with the anti-SARS-CoV-2 antibodies of the disclosure. After binding and washing to remove non-specifically bound immune complexes, the bound anti-SARS-CoV-2 antibodies are detected. Where the initial anti-SARS-CoV-2 antibodies are linked to a detectable label, the immune complexes may be detected directly. Again, the immune complexes may be detected using a second antibody that has binding affinity for the first anti-SARS-CoV-2 antibody, with the second antibody being linked to a detectable label.

[0238] Irrespective of the format employed, ELISAs have certain features in common, such as coating, incubating and binding, washing to remove non-specifically bound species, and detecting the bound immune complexes. These are described below.

[0239] In coating a plate with either antigen or antibody, one will generally incubate the wells of the plate with a solution of the antigen or antibody, either overnight or for a specified period of hours. The wells of the plate will then be washed to remove incompletely adsorbed material. Any remaining available surfaces of the wells are then “coated” with a nonspecific protein that is antigenically neutral with regard to the test antisera. These include bovine serum albumin (BSA), casein or solutions of milk powder. The coating allows for blocking of nonspecific adsorption sites on the immobilizing surface and thus reduces the background caused by nonspecific binding of antisera onto the surface.

[0240] In ELISAs, it is probably more customary to use a secondary or tertiary detection means rather than a direct procedure. Thus, after binding of a protein or antibody to the well, coating with a non-reactive material to reduce background, and washing to remove unbound material, the immobilizing surface is contacted with the biological sample to be tested under conditions effective to allow immune complex (antigen/antibody) formation. Detection of the immune complex then requires a labeled secondary binding ligand or antibody, and a secondary binding ligand or antibody in conjunction with a labeled tertiary antibody or a third binding ligand.

[0241] “Under conditions effective to allow immune complex (antigen/antibody) formation” means that the conditions preferably include diluting the antigens and/or antibodies with solutions such as BSA, bovine gamma globulin (BGG) or phosphate buffered saline (PBS)/Tween. These added agents also tend to assist in the reduction of nonspecific background.

[0242] The “suitable” conditions also mean that the incubation is at a temperature or for a period of time sufficient to allow effective binding. Incubation steps are typically from about 1 to 2 to 4 hours or so, at temperatures preferably on the order of 25° C. to 27° C., or may be overnight at about 4° C. or so.

[0243] Following all incubation steps in an ELISA, the contacted surface is washed so as to remove non-complexed material. A preferred washing procedure includes washing with a solution such as PBS/Tween, or borate buffer. Following the formation of specific immune complexes between the test sample and the originally bound material, and subsequent washing, the occurrence of even minute amounts of immune complexes may be determined.

[0244] To provide a detecting means, the second or third antibody will have an associated label to allow detection. Preferably, this will be an enzyme that will generate color development upon incubating with an appropriate chromogenic substrate. Thus, for example, one will desire to contact or incubate the first and second immune complex with a urease, glucose oxidase, alkaline phosphatase or hydrogen peroxidase-conjugated antibody for a period of time and under conditions that favor the development of further immune complex formation (e.g., incubation for 2 hours at room temperature in a PBS-containing solution such as PBS-Tween).

[0245] After incubation with the labeled antibody, and subsequent to washing to remove unbound material, the amount of label is quantified, e.g., by incubation with a chromogenic substrate such as urea, or bromocresol purple, or 2,2′-azino-di-(3-ethyl-benzthiazoline-6-sulfonic acid (ABTS), or H₂O₂, in the case of peroxidase as the enzyme label. Quantification is then achieved by measuring the degree of color generated, e.g., using a visible spectra spectrophotometer.

[0246] In another embodiment, the present disclosure contemplates the use of competitive formats. This is particularly useful in the detection of SARS-CoV-2 antibodies in sample. In competition-based assays, an unknown amount of analyte or antibody is determined by its ability to displace a known amount of labeled antibody or analyte. Thus, the quantifiable loss of a signal is an indication of the amount of unknown antibody or analyte in a sample.

[0247] Here, the inventor proposes the use of labeled SARS-CoV-2 monoclonal antibodies to determine the amount of SARS-CoV-2 antibodies in a sample. The basic format would include contacting a known amount of SARS-CoV-2 monoclonal antibody (linked to a detectable label) with SARS-CoV-2 antigen or particle. The SARS-CoV-2 antigen or organism is preferably attached to a support. After binding of the labeled monoclonal antibody to the support, the sample is added and incubated under conditions permitting any unlabeled antibody in the sample to compete with, and hence displace, the labeled monoclonal antibody. By measuring either the lost label or the label remaining (and subtracting that from the original amount of bound label), one can determine how much non-labeled antibody is bound to the support, and thus how much antibody was present in the sample.

[0248] B. Western Blot

[0249] The Western blot (alternatively, protein immunoblot) is an analytical technique used to detect specific proteins in a given sample of tissue homogenate or extract. It uses gel electrophoresis to separate native or denatured proteins by the length of the polypeptide (denaturing conditions) or by the 3-D structure of the protein (native/non-denaturing conditions). The proteins are then transferred to a membrane (typically nitrocellulose or PVDF), where they are probed (detected) using antibodies specific to the target protein.

[0250] Samples may be taken from whole tissue or from cell culture. In most cases, solid tissues are first broken down mechanically using a blender (for larger sample volumes), using a homogenizer (smaller volumes), or by sonication. Cells may also be broken open by one of the above mechanical methods. However, it should be noted that bacteria, virus or environmental samples can be the source of protein and thus Western blotting is not restricted to cellular studies only. Assorted detergents, salts, and buffers may be employed to encourage lysis of cells and to solubilize proteins. Protease and phosphatase inhibitors are often added to prevent the digestion of the sample by its own enzymes. Tissue preparation is often done at cold temperatures to avoid protein denaturing.

[0251] The proteins of the sample are separated using gel electrophoresis. Separation of proteins may be by isoelectric point (pI), molecular weight, electric charge, or a combination of these factors. The nature of the separation depends on the treatment of the sample and the nature of the gel. This is a very useful way to determine a protein. It is also possible to use a two-dimensional (2-D) gel which spreads the proteins from a single sample out in two dimensions. Proteins are separated according to isoelectric point (pH at which they have neutral net charge) in the first dimension, and according to their molecular weight in the second dimension.

[0252] In order to make the proteins accessible to antibody detection, they are moved from within the gel onto a membrane made of nitrocellulose or polyvinylidene difluoride (PVDF). The membrane is placed on top of the gel, and a stack of filter papers placed on top of that. The entire stack is placed in a buffer solution which moves up the paper by capillary action, bringing the proteins with it. Another method for transferring the proteins is called electroblotting and uses an electric current to pull proteins from the gel into the PVDF or nitrocellulose membrane. The proteins move from within the gel onto the membrane while maintaining the organization they had within the gel. As a result of this blotting process, the proteins are exposed on a thin surface layer for detection (see below). Both varieties of membrane are chosen for their non-specific protein binding properties (i.e., binds all proteins equally well). Protein binding is based upon hydrophobic interactions, as well as charged interactions between the membrane and protein. Nitrocellulose membranes are cheaper than PVDF but are far more fragile and do not stand up well to repeated probings. The uniformity and overall effectiveness of transfer of protein from the gel to the membrane can be checked by staining the membrane with Coomassie Brilliant Blue or Ponceau S dyes. Once transferred, proteins are detected using labeled primary antibodies, or unlabeled primary antibodies followed by indirect detection using labeled protein A or secondary labeled antibodies binding to the Fc region of the primary antibodies.

[0253] C. Lateral Flow Assays

[0254] Lateral flow assays, also known as lateral flow immunochromatographic assays, are simple devices intended to detect the presence (or absence) of a target analyte in sample (matrix) without the need for specialized and costly equipment, though many laboratory-based applications exist that are supported by reading equipment. Typically, these tests are used as low resources medical diagnostics, either for home testing, point of care testing, or laboratory use. A widely spread and well-known application is the home pregnancy test.

[0255] The technology is based on a series of capillary beds, such as pieces of porous paper or sintered polymer. Each of these elements has the capacity to transport fluid (e.g., urine) spontaneously. The first element (the sample pad) acts as a sponge and holds an excess of sample fluid. Once soaked, the fluid migrates to the second element (conjugate pad) in which the manufacturer has stored the so-called conjugate, a dried format of bio-active particles (see below) in a salt-sugar matrix that contains everything to guarantee an optimized chemical reaction between the target molecule (e.g., an antigen) and its chemical partner (e.g., antibody) that has been immobilized on the particle's surface. While the sample fluid dissolves the salt-sugar matrix, it also dissolves the particles and in one combined transport action the sample and conjugate mix while flowing through the porous structure. In this way, the analyte binds to the particles while migrating further through the third capillary bed. This material has one or more areas (often called stripes) where a third molecule has been immobilized by the manufacturer. By the time the sample-conjugate mix reaches these strips, analyte has been bound on the particle and the third ‘capture’ molecule binds the complex. After a while, when more and more fluid has passed the stripes, particles accumulate and the stripe-area changes color. Typically there are at least two stripes: one (the control) that captures any particle and thereby shows that reaction conditions and technology worked fine, the second contains a specific capture molecule and only captures those particles onto which an analyte molecule has been immobilized. After passing these reaction zones, the fluid enters the final porous material—the wick—that simply acts as a waste container. Lateral Flow Tests can operate as either competitive or sandwich assays. Lateral flow assays are disclosed in U.S. Pat. No. 6,485,982.

[0256] D. Immunohistochemistry

[0257] The antibodies of the present disclosure may also be used in conjunction with both fresh-frozen and/or formalin-fixed, paraffin-embedded tissue blocks prepared for study by immunohistochemistry (IHC). The method of preparing tissue blocks from these particulate specimens has been successfully used in previous IHC studies of various prognostic factors and is well known to those of skill in the art (Brown et al., 1990; Abbondanzo et al., 1990; Allred et al., 1990).

[0258] Briefly, frozen-sections may be prepared by rehydrating 50 ng of frozen “pulverized” tissue at room temperature in phosphate buffered saline (PBS) in small plastic capsules; pelleting the particles by centrifugation; resuspending them in a viscous embedding medium (OCT); inverting the capsule and/or pelleting again by centrifugation; snap-freezing in −70° C. isopentane; cutting the plastic capsule and/or removing the frozen cylinder of tissue; securing the tissue cylinder on a cryostat microtome chuck; and/or cutting 25-50 serial sections from the capsule. Alternatively, whole frozen tissue samples may be used for serial section cuttings.

[0259] Permanent-sections may be prepared by a similar method involving rehydration of the 50 mg sample in a plastic microfuge tube; pelleting; resuspending in 10% formalin for 4 hours fixation; washing/pelleting; resuspending in warm 2.5% agar; pelleting; cooling in ice water to harden the agar; removing the tissue/agar block from the tube; infiltrating and/or embedding the block in paraffin; and/or cutting up to 50 serial permanent sections. Again, whole tissue samples may be substituted.

[0260] E. Immunodetection Kits

[0261] In still further embodiments, the present disclosure concerns immunodetection kits for use with the immunodetection methods described above. As the antibodies may be used to detect SARS-CoV-2 or SARS-CoV-2 antigens, the antibodies may be included in the kit. The immunodetection kits will thus comprise, in suitable container means, a first antibody that binds to SARS-CoV-2 or SARS-CoV-2 antigen, and optionally an immunodetection reagent.

[0262] In certain embodiments, the SARS-CoV-2 antibody may be pre-bound to a solid support, such as a column matrix and/or well of a microtiter plate. The immunodetection reagents of the kit may take any one of a variety of forms, including those detectable labels that are associated with or linked to the given antibody. Detectable labels that are associated with or attached to a secondary binding ligand are also contemplated. Exemplary secondary ligands are those secondary antibodies that have binding affinity for the first antibody.

[0263] Further suitable immunodetection reagents for use in the present kits include the two-component reagent that comprises a secondary antibody that has binding affinity for the first antibody, along with a third antibody that has binding affinity for the second antibody, the third antibody being linked to a detectable label. As noted above, a number of exemplary labels are known in the art and all such labels may be employed in connection with the present disclosure.

[0264] The kits may further comprise a suitably aliquoted composition of the SARS-CoV-2 or SARS-CoV-2 antigens, whether labeled or unlabeled, as may be used to prepare a standard curve for a detection assay. The kits may contain antibody-label conjugates either in fully conjugated form, in the form of intermediates, or as separate moieties to be conjugated by the user of the kit. The components of the kits may be packaged either in aqueous media or in lyophilized form.

[0265] The container means of the kits will generally include at least one vial, test tube, flask, bottle, syringe or other container means, into which the antibody may be placed, or preferably, suitably aliquoted. The kits of the present disclosure will also typically include a means for containing the antibody, antigen, and any other reagent containers in close confinement for commercial sale. Such containers may include injection or blow-molded plastic containers into which the desired vials are retained.

[0266] F. Vaccine and Antigen Quality Control Assays

[0267] The present disclosure also contemplates the use of antibodies and antibody fragments as described herein for use in assessing the antigenic integrity of a viral antigen in a sample. Biological medicinal products like vaccines differ from chemical drugs in that they cannot normally be characterized molecularly; antibodies are large molecules of significant complexity and have the capacity to vary widely from preparation to preparation. They are also administered to healthy individuals, including children at the start of their lives, and thus a strong emphasis must be placed on their quality to ensure, to the greatest extent possible, that they are efficacious in preventing or treating life-threatening disease, without themselves causing harm.

[0268] The increasing globalization in the production and distribution of vaccines has opened new possibilities to better manage public health concerns but has also raised questions about the equivalence and interchangeability of vaccines procured across a variety of sources. International standardization of starting materials, of production and quality control testing, and the setting of high expectations for regulatory oversight on the way these products are manufactured and used, have thus been the cornerstone for continued success. But it remains a field in constant change, and continuous technical advances in the field offer a promise of developing potent new weapons against the oldest public health threats, as well as new ones—malaria, pandemic influenza, and HIV, to name a few—but also put a great pressure on manufacturers, regulatory authorities, and the wider medical community to ensure that products continue to meet the highest standards of quality attainable.

[0269] Thus, one may obtain an antigen or vaccine from any source or at any point during a manufacturing process. The quality control processes may therefore begin with preparing a sample for an immunoassay that identifies binding of an antibody or fragment disclosed herein to a viral antigen. Such immunoassays are disclosed elsewhere in this document, and any of these may be used to assess the structural/antigenic integrity of the antigen. Standards for finding the sample to contain acceptable amounts of antigenically correct and intact antigen may be established by regulatory agencies.

[0270] Another important embodiment where antigen integrity is assessed is in determining shelf-life and storage stability. Most medicines, including vaccines, can deteriorate over time. Therefore, it is critical to determine whether, over time, the degree to which an antigen, such as in a vaccine, degrades or destabilizes such that is it no longer antigenic and/or capable of generating an immune response when administered to a subject. Again, standards for finding the sample to contain acceptable amounts of antigenically intact antigen may be established by regulatory agencies.

[0271] In certain embodiments, viral antigens may contain more than one protective epitope. In these cases, it may prove useful to employ assays that look at the binding of more than one antibody, such as 2, 3, 4, 5 or even more antibodies. These antibodies bind to closely related epitopes, such that they are adjacent or even overlap each other. On the other hand, they may represent distinct epitopes from disparate parts of the antigen. By examining the integrity of multiple epitopes, a more complete picture of the antigen's overall integrity, and hence ability to generate a protective immune response, may be determined.

[0272] Antibodies and fragments thereof as described in the present disclosure may also be used in a kit for monitoring the efficacy of vaccination procedures by detecting the presence of protective SARS-CoV-2 antibodies. Antibodies, antibody fragment, or variants and derivatives thereof, as described in the present disclosure may also be used in a kit for monitoring vaccine manufacture with the desired immunogenicity.

TABLE 1
NUCLEOTIDE SEQUENCES FOR ANTIBODY VARIABLE REGION

| | Seq | | |
|---|---|---|---|
| Clone | ID | Chain | Variable Sequence Region |
| COV2- | 9152 | heavy | CAGGTGCAGCTGGTGCAATCTGGGTCTGAGTTGCAGAAGCCTGGGGCCTCAGTGAAGGTTTC |
| 166 | | | CTGTAAGGCTTCTGGAAACACCTTCCCTACTTATGATATGAATTGGGTGCGACAGGCCCCTG |
| | | | GACAAGGGCTTGAGTGGATGGGATGGATCAACACCAACACTGGGAGCCCAACGTATGCCCAG |
| | | | GGCTTACCAGGACGGTTTGTCTTCTCCTTGGACACATCTGTCAGCACGGCATATCTGGAGAT |
| | | | CAGCAGCCTAAAGGCTGAGGACACTGCCGTGTATTACTGTGCGAGAGAGGGGTATCACTACG |
| | | | GTATGGACGTCTGGGGCCAAGGGACCACGGTCACCGTCTCCTCA |
| | 9153 | light | GACATCCAGATGACCCAGTCTCCATCCTCACTGTCTGCCTCTGTAGGAGACAGAGTCACCAT |
| | | | CACTTGTCGGGCGAGTCAGGACATTAACAATTATTTAGCCTGGTTTCAGCAGAAACCAGGTA |
| | | | AAGCCCCTAAGTCCCTGATCTATTCTGCGTCCAGTTTGCAAAGTGGGGTCCCATCGAGGTTC |
| | | | AGCGGCAGTGGATCTGGGACAGATTTCACTCTCACCATCAGCAGCCTGCAGCCTGAAGATTT |
| | | | TGCAACTTATTATTGCCAACAGTATCGTAGTTACCCTCGGACTTTTGGCCAGGGGACCAAGC |
| | | | TGGAGATCAAAC |
| COV2- | 9154 | heavy | CAGGCACACCTGGTGCAGTCTGGGGCTGAGGTGAAGAAGCCTGGGTCCTCGGTGAAGGTCTC |
| 167 | | | CTGCAAGGCTTCTGGAGGCACCTTCAACAGTCATGCCATCGGCTGGGTGCGACAGGCCCCTG |
| | | | GACAAGGCCTTGAGTGGATGGGAAGGATCGTCCCTATCCGGAAGACCACAACTTACGCACCG |
| | | | CAGTTACAGGGCAGACTCACGCTGACCGCGGACACATCCACGAGCACACTGTACATGGAACT |
| | | | GAGTAGCCTGCGATCCGAGGACTCGGCCCGGTATTACTGTGCGAGAGTCATTCTGTCTGGGA |
| | | | GGGGCTTTGACATCTGGGGCCAGGGATCCCTGGTCGCCGTCTCCTCAG |
| | 9155 | light | TCCTATGAGCTGACACAGCCACCCTCAGTGTCAGTGTCCCCAGGACAGACGGCCAGGATCAT |
| | | | CTGCTCTGGAGATGCATTGCCAAAGCAAAATGCTTATTGGTACCAGAAGAAGCCAGGCCAGG |
| | | | CCCCTGTGTTGGTGATATTTAAAGACAGTGAGAGGCCCTCAGGCATCCCTCAGCGATTCTCT |
| | | | GGCTCCAGCTCGGGGACAACAGTCACGTTGACCATCAGTGGAGTCCAGGCAGAAGACGAGGC |
| | | | TGACTATTACTGTCAATCAGCAGACAGCAGTGGTACTTATGTGGTATTCGGCGGAGGGACCA |
| | | | AGCTGACCGTCCTAG |
| COV2- | 9156 | heavy | GAGGTGCAGTTGGTGGAGTCTGGGGGAGGCTTGGTCCAGCCTGGGGGGTCCCTGAGACTCTC |
| 168 | | | CTGTGCAGCCTCTGGATTCATCTTTAGTAACTTTTGGATGAACTGGGTCCGCCAGGCTCCAG |
| | | | GGAAGGGGCTGGAGTGGGTGGCCAACATACAGCAAGATGGAAGTGAGAAATACTATGTGGAC |
| | | | TCTGTGAAGGGCCGATTCACCATCTCCACAGACCTCGCCAAGAACTCACTGTATCTGCAAAT |
| | | | GAACAGCCTGAGAGCCGAAGACACGGCTGTGTATTACTGTGCGAGACAACACGGTGACTACG |
| | | | ACTGGTACTTTGACTACTGGGGCCAGGGAACCCTGGTCACCGTCTCCTCAG |
| | 9157 | light | TCCTATGAGCTGACACAGCCACCCTCAGTGTCAGTGTCCCCAGGACAGACGGCCAGGATCAT |
| | | | CTGCTCTGGAGATGCATTGCCAAAGCAAAATGCTTATTGGTACCAGAAGAAGCCAGGCCAGG |
| | | | CCCCTGTGTTGGTGATATTTAAAGACAGTGAGAGGCCCTCAGGCATCCCTCAGCGATTCTCT |
| | | | GGCTCCAGCTCGGGGACAACAGTCACGTTGACCATCAGTGGAGTCCAGGCAGAAGACGAGGC |
| | | | TGACTATTACTGTCAATCAGCAGACAGCAGTGGTACTTATGTGGTATTCGGCGGAGGGACCA |
| | | | AGCTGACCGTCCTAG |
| COV2- | 9158 | heavy | GAGGTGCAGTTGGTGGAGTCTGGGGGAGGCTTGGTCCAGCCTGGGGGGTCCCTGAGACTCTC |
| 169 | | | CTGTGCAGCCTCTGGATTCATCTTTAGTAACTTTTGGATGAACTGGGTCCGCCAGGCTCCAG |
| | | | GGAAGGGGCTGGAGTGGGTGGCCAACATACAGCAAGATGGAAGTGAGAAATACTATGTGGAC |
| | | | TCTGTGAAGGGCCGATTCACCATCTCCACAGACCTCGCCAAGAACTCACTGTATCTGCAAAT |
| | | | GAACAGCCTGAGAGCCGAAGACACGGCTGTGTATTACTGTGCGAGACAACACGGTGACTACG |
| | | | ACTGGTACTTTGACTACTGGGGCCAGGGAACCCTGGTCACCGTCTCCTCAG |
| | 9159 | light | GACATCCAGATGACCCAGTCTCCATCCTCACTGTCTGCCTCTGTAGGAGACAGAGTCACCAT |
| | | | CACTTGTCGGGCGAGTCAGGACATTAACAATTATTTAGCCTGGTTTCAGCAGAAACCAGGTA |
| | | | AAGCCCCTAAGTCCCTGATCTATTCTGCGTCCAGTTTGCAAAGTGGGGTCCCATCGAGGTTC |
| | | | AGCGGCAGTGGATCTGGGACAGATTTCACTCTCACCATCAGCAGCCTGCAGCCTGAAGATTT |
| | | | TGCAACTTATTATTGCCAACAGTATCGTAGTTACCCTCGGACTTTTGGCCAGGGGACCAAGC |
| | | | TGGAGATCAAAC |
| COV2- | 9160 | heavy | GAGGTGCAGCTGTTGGAGTCTGGGGGAGGCTTGGTACAGCCTGGGGGGTCCCTGAGACTCTC |
| 170 | | | CTGTGCAGCCTCTGGATTCACCTTTAGCAGCTATGCCGTGTACTGGGTCCGCCAGGCTCCAG |
| | | | GGAAGGGGCTGGAGTGCGTCTCATTTATTAGTGGTGGTGGTGAAACCACAGACTACGCAGAC |
| | | | TCCGTGAAGGGCCGGTTCACCATCTCCAGAGACAATTCCAAGAACACGTTGTATCTGCAAAT |
| | | | GAACGGCCTGAGAGCCGAGGACACGGCCGTATATTACTGTGCGAAATCCCCGGACGCAACAT |
| | | | TTCTGTGGTTCGGGGAGCCCTTCGGCTACTGGGGCCAGGGAACCCTGGTCACCGTCTCCTCA |
| | | | G |
| | 9161 | light | GAAATTGTGTTGACGCAGTCTCCAGGCACCCTGTCTTTGTCTCCAGGGGAAAGAGCCACCCT |
| | | | CTCCTGCAGGGCCAGTGAGAGTGTCAGTAGTAACTACTTAGCCTGGTACCAGCAGAAGCCTG |
| | | | GCCAGGCTCCCAGGCTCCTCATCTACGATGCATCCAGCAGGGCCACTGGCATCCCAGACAGG |
| | | | TTCAGTGGCAGTGGGTCTGGGACAGACTTCACTCTCACCATCAGCAAACTGGAGCCTGAAGA |
| | | | TTTTGCAGTATATTACTGTCAGCAGTATGCTCGGGCCCCGGACACCTTCGCCCAAGGGACAC |
| | | | GACTGGAGATTAAAC |
| COV2- | 9162 | heavy | CAGGTGCAGCTGGTGGAGTCTGGGGGAGGCGTGGTCCAGCCTGGGAGGTCCCTGAGACTCTC |
| 171 | | | CTGTGCAGCCTCTGGATTCACCTTCAGTAGCTATGCTATGCACTGGGTCCGCCAGGCTCCAG |
| | | | GCAAGGGGCTGGAGTGGGTGGCAGTTATATCATATGATGGAAGCAATAAATACTACGCAGAC |
| | | | TCCGTGAAGGGCCGATTCACCATCTCCAGAGACAATTCCAAGAACACGCTGTATCTGCAAAT |
| | | | GAACAGCCTGAGAGCTGAGGACACGGCTGTGTATTACTGTGCGAGAGATCCTAACCCAATGG |
| | | | TTTTGGCCTACTTTGACTACTGGGGCCAGGGAACCCTGGTCACCGTCTCCTCAG |
| | 9163 | light | CAGACTGTGGTGACCCAGGAGCCATCGTTCTCAGTGTCCCCTGGAGGGACAGTCACACTCAC |
| | | | TTGTGGCTTGAGCTCTGGCTCAGTCTCTACTAGTTACTACCCCAGCTGGTACCAGCAGACCC |
| | | | CAGGCCAGGCTCCACGCACGCTCATCTACAGCACAAACACTCGCTCTTCTGGGGTCCCTGAT |
| | | | CGCTTCTCTGGCTCCATCCTTGGGAACAAAGCTGCCCTCACCATCACGGGGGCCCAGGCAGA |
| | | | TGATGAATCTGATTATTACTGTGTGCTGTATATGGGTAGTGGCATTTGGGTGTTCGGCGGAG |
| | | | GGACCAAGCTGACCGTCCTAG |
| COV2- | 9164 | heavy | GAGGTGCAGCTGTTGGAGTCTGGGGGAGGCTTGGTACAGCCTGGGGGGTCCCTGAGACTCTC |
| 172 | | | CTGTGCAGCCTCTGGATTCACCTTTAGCAGCTATGCCGTGTACTGGGTCCGCCAGGCTCCAG |
| | | | GGAAGGGGCTGGAGTGCGTCTCATTTATTAGTGGTGGTGGTGAAACCACAGACTACGCAGAC |
| | | | TCCGTGAAGGGCCGGTTCACCATCTCCAGAGACAATTCCAAGAACACGTTGTATCTGCAAAT |
| | | | GAACGGCCTGAGAGCCGAGGACACGGCCGTATATTACTGTGCGAAATCCCCGGACGCAACAT |
| | | | TTCTGTGGTTCGGGGAGCCCTTCGGCTACTGGGGCCAGGGAACCCTGGTCACCGTCTCCTCA |
| | | | G |
| | 9165 | light | TCCTATGAGCTGACACAGCCACCCTCAGTGTCAGTGTCCCCAGGACAGACGGCCAGGATCAT |
| | | | CTGCTCTGGAGATGCATTGCCAAAGCAAAATGCTTATTGGTACCAGAAGAAGCCAGGCCAGG |
| | | | CCCCTGTGTTGGTGATATTTAAAGACAGTGAGAGGCCCTCAGGCATCCCTCAGCGATTCTCT |
| | | | GGCTCCAGCTCGGGGACAACAGTCACGTTGACCATCAGTGGAGTCCAGGCAGAAGACGAGGC |
| | | | TGACTATTACTGTCAATCAGCAGACAGCAGTGGTACTTATGTGGTATTCGGCGGAGGGACCA |
| | | | AGCTGACCGTCCTAG |
| COV2- | 9166 | heavy | CAGGTGCAGCTGGTGGAGTCTGGGGGAGGCGTGGTCCAGCCTGGGAGGTCCCTGAGACTCTC |
| 173 | | | GTGTGCAGCCTCTGGTTTTAACCTCAGCAACTATGCTATGCACTGGGTCCGCCAGGCATCAG |
| | | | GCAAGGGGCTGGAGTGGGTGTCACTTATATCATACGATGGAAGTATTAAATATTACACAGAC |
| | | | TCCGTGAAGGGCCGATTCACCGTCTCCGGGGACAATTCCAAGAACACACTGTTTCTGCAAAT |
| | | | GAACAGCCTGCGACCTGACGACTCGGCTCTTTATTACTGTGTGAGGGGCGGTGTCAGTGGCC |
| | | | CAAATTCTTTTGATATGTGGGGCCAAGGGACAACGGTCACCGTCTCTTC |
| | 9167 | light | TCCTATGAGCTGACACAGCCACCCTCAGTGTCAGTGTCCCCAGGACAGACGGCCAGGATCAT |
| | | | CTGCTCTGGAGATGCATTGCCAAAGCAAAATGCTTATTGGTACCAGAAGAAGCCAGGCCAGG |
| | | | CCCCTGTGTTGGTGATATTTAAAGACAGTGAGAGGCCCTCAGGCATCCCTCAGCGATTCTCT |
| | | | GGCTCCAGCTCGGGGACAACAGTCACGTTGACCATCAGTGGAGTCCAGGCAGAAGACGAGGC |
| | | | TGACTATTACTGTCAATCAGCAGACAGCAGTGGTACTTATGTGGTATTCGGCGGAGGGACCA |
| | | | AGCTGACCGTCCTAG |
| COV2- | 9168 | heavy | GAGGTGCAGCTGGTGGAGTCTGGGGGAGGCTTGGTCCAGCCTGGGGGGTCCCTGACACTCTC |
| 174 | | | CTGTGCAGCCTCTGGTTTGACCATTAGAAACTATTGGATGAACTGGGTCCGCCAGGCTCCAG |
| | | | GGAAGGGGCTGGAGTGGGTGGCCAACATGGAAGAAGATGGAAGTGAGAAAAACTATGTGGAC |
| | | | TCTGTGAAGGGCCGATTCATCATCTCCAGAGACGACGCCAAGAACTCACTATATCTACAAAT |
| | | | GAACAGCCTGAGAGCCGAGGACACGGCTGTATATTACTGTACGAGAGATCCCGGTCCCGGGG |
| | | | ATTTTTCGTGGGGCCAGGGAACCGTGGTAACCGTCTCCTCAG |
| | 9169 | light | GAAATAGTGTTGACGCAGTCTCCAGCCACCCTGTCTGTGTCTCCAGGGGAAAGGGTCACCCT |
| | | | CTCCTGCAGGGCCAGTCAGACTGTAAACAACAACTTAAACTGGCTCCAGCACAAACCGGGCC |
| | | | AGGCTCCCAGGCTCGTCATCATTGGTACATCTACCAGGGCCTCTGGTGTCCCAGCCAGGTTC |
| | | | AGTGGCAGTGGGTCGGGGACAGAGTTCACTCTCACCATCAGCAGCCTGCAGTCTGAGGATTA |
| | | | TGCAATTTATTACTGTCAACAGTATTATGAGTGGCCTCCGATCACCTACGGCCAAGGGACAC |
| | | | GACTGGAGATTA |
| COV2- | 9170 | heavy | CAAGTGCAGCTCCAGCAGTCGGGCCCAGGACTGGTGAGGCCTTCGGGGACCCTGTCCCTCAC |
| 175 | | | GTGCGGTGTCTCTGGTGGCTCCATCAGCAGTCCTAATTGGTGGAGTTGGGTCCGCCAGGCCC |
| | | | CAGGGAAGGGACTGGAGTGGATTGGCGAAGTCTATCCTACTGGGAACACCTACTACAACCCG |
| | | | TCCCTCAAGAGTCGAGTCACCATTTCAATAGAGGAGTCGAAGAACGAGTTCTCCCTGAACTT |
| | | | GAGCTCTGTGACCGCCGCAGACATGGGCATTTATTACTGTGCGAGAGGCGTCGTGGGAGCAA |
| | | | GCGACTTCTATTATTACGGTATGGACGTCTGGGGCCAAGGGACCGCGGTCACCGTCTCCTCA |
| | 9171 | light | GAGATCGTGATGACCCAGTCTCCAGACTCCCTGACTGTGTCTCTGGGCGAGAGGGCCACCAT |
| | | | CAGCTGCAAGTCCAGCCAGAGTCTTTTATACAGTTCCAACAATAGGGACTACTTAGCTTGGT |
| | | | ACCAACAGAAAGCAGGTCAGCCTCCTAAGTTGCTCTTTTACTGGGCATCTACCCGGGAATCC |
| | | | GGGGTCCCTGACCGATTCGGTGGCAGCGGGTCTGGGACACATTTCACTCTCACCATCTACAA |
| | | | CCTGCAGCCTGAAGATGTGGCAGTTTATTTCTGTCAGCAGTATTTTAGTCCTCCGTATACTT |
| | | | TTGGCCAGGGGACCAAGCTGGAGATCAAAC |
| COV2- | 9172 | heavy | CAGGTGCAGCTGCAGGAGTCGGGCCCAGGACTGGTGAAGCCTTCACAGACCCTGTCCCTCAA |
| 176 | | | CTGCTCTGTCTCTGGAGACTCCATCAGCAGAAGTGATTATCACTGGAGTTGGATCCGCCAGC |
| | | | ACCCGGGAAAGGGCCTGGAGTGGATTGGCTATATATATAATAATGGCGACACATATTATAAT |
| | | | CCGTCCCTCAAGAGTCGTGTTACCATGTCAGTAGACACGTCTAAGAACGAGTTCTCCCTGAA |
| | | | GCTGACCTCTGTGACTGCCGCGGACACGGCCGTCTATTACTGTGCGAGAGACGGTTACGCTG |
| | | | GTAACTCCGAGGCTCTTGACTACTGGGGCCAGGGAACCCTGGTCACCGTCTC |
| | 9173 | light | GAAATTGTGTTGACACAGTCTCCAGCCTCCCTGTCTTTGTCTCCAGGGGAAAGAGCCACCCT |
| | | | CTCCTGCAGGGCCAGTCAGAGTGTTACCAACTACTTAGCCTGGTACCAACAGAGACCTGGCC |
| | | | AGGCTCCCAGGCTCCTCATCTATCAAACATCCAACAGGGCCACTGGCATCCCAGCCAGGTTC |
| | | | AGTGGCAGTGGGTCTGGGACAGACTTCACACTCACCATCAGCAGCCTAGAGCCTGAAGATTT |
| | | | TGCATTTTATTACTGTCAGCAGCGCAGCCACCGGCCCGGGGGGATCACGTTCGGCCAAGGGA |
| | | | CACGACTGGAGATTAAAC |
| COV2- | 9174 | heavy | GAGGTGCAGTTGGTGGAGTCTGGGGGAGGCTTGGTCCAGCCTGGGGGGTCCCTGAGACTCTC |
| 177 | | | CTGTGCAGCCTCTGGATTCATCTTTAGTAACTTTTGGATGAACTGGGTCCGCCAGGCTCCAG |
| | | | GGAAGGGGCTGGAGTGGGTGGCCAACATACAGCAAGATGGAAGTGAGAAATACTATGTGGAC |
| | | | TCTGTGAAGGGCCGATTCACCATCTCCACAGACCTCGCCAAGAACTCACTGTATCTGCAAAT |
| | | | GAACAGCCTGAGAGCCGAAGACACGGCTGTGTATTACTGTGCGAGACAACACGGTGACTACG |
| | | | ACTGGTACTTTGACTACTGGGGCCAGGGAACCCTGGTCACCGTCTCCTCAG |
| | 9175 | light | GACATCCAGATGACCCAGTCTCCATCCTCCCTGTCTGCATCTGTAGGAGACAGAGTCACCAT |
| | | | CACTTGCCAGGCGAGTCAGGACATTAGCAACTATTTAAATTGGTATCAGCAGAAACCAGGGA |
| | | | AAGCCCCTAAGCTCCTGATCTACGATGCATCCAATTTGGAAACAGGGGTCCCATCAAGGTTC |
| | | | AGCGGCAGTGGATCTGGGACAGATTTTACTTTCACCATCAGCAGCCTGCAGCCTGAAGATAT |
| | | | TGCAACATATTACTGTCAACAGTATGATAATCTCCCTCTCACTTTCGGCCCTGGGACCAAAG |
| | | | TGGATATCAAAC |
| COV2- | 9176 | heavy | GAGGTGCAGTTGGTGGAGTCTGGGGGAGGCTTGGTCCAGCCTGGGGGGTCCCTGAGACTCTC |
| 178 | | | CTGTGCAGCCTCTGGATTCATCTTTAGTAACTTTTGGATGAACTGGGTCCGCCAGGCTCCAG |
| | | | GGAAGGGGCTGGAGTGGGTGGCCAACATACAGCAAGATGGAAGTGAGAAATACTATGTGGAC |
| | | | TCTGTGAAGGGCCGATTCACCATCTCCACAGACCTCGCCAAGAACTCACTGTATCTGCAAAT |
| | | | GAACAGCCTGAGAGCCGAAGACACGGCTGTGTATTACTGTGCGAGACAACACGGTGACTACG |
| | | | ACTGGTACTTTGACTACTGGGGCCAGGGAACCCTGGTCACCGTCTCCTCAG |
| | 9177 | light | GAGATCGTGATGACCCAGTCTCCAGACTCCCTGACTGTGTCTCTGGGCGAGAGGGCCACCAT |
| | | | CAGCTGCAAGTCCAGCCAGAGTCTTTTATACAGTTCCAACAATAGGGACTACTTAGCTTGGT |
| | | | ACCAACAGAAAGCAGGTCAGCCTCCTAAGTTGCTCTTTTACTGGGCATCTACCCGGGAATCC |
| | | | GGGGTCCCTGACCGATTCGGTGGCAGCGGGTCTGGGACACATTTCACTCTCACCATCTACAA |
| | | | CCTGCAGCCTGAAGATGTGGCAGTTTATTTCTGTCAGCAGTATTTTAGTCCTCCGTATACTT |
| | | | TTGGCCAGGGGACCAAGCTGGAGATCAAAC |
| COV2- | 9178 | heavy | GAGGTGCAATTAGTGGAGTCTGGGGGAGGCCTGGTCAAGCCTGGGGAGTCCCTGAGACTCTC |
| 179 | | | CTGTGCGGCCTCTAAATTCACCTTCAGTACCTATCATATGAACTGGATTCGCCAGGCTCCAG |
| | | | GAAAGGGGCTAGAGTGGGTCTCAGCCATCAGTGCTGACAGTACGGTCACAACATATGCAGAC |
| | | | TCAGTGAGGGGCCGATTCATCATTTCTAGAGACAACGACAAGAATTCACTGTATCTGCAAAT |
| | | | GAATGGCCTGAGAGTGGACGACCTGGCTGTATATTACTGTGCGAGGGGGCGTGCGCGTGGTA |
| | | | GTGATCATACTGGATTTGACTCCTGGGGCCAGGGAACCCTGGTCACCGTCTCCTCAG |
| | 9179 | light | GATATTGTGATGACTCAGTCTCCACTCTCCCTGTCCGTCACCCCTGGAGAGCCGGCCTCCAT |
| | | | CTCCTGCAGGTCAAGTCAGAGCCTCCTGCATCGTAATGGATACAACATATTGGATTGGTACC |
| | | | TGCAGAAGCCAGGGCAGTCTCCACAACTCCTGATCTATTTGGGTTCTAATCGGGCCTCCGGG |
| | | | GTCCCTGACAGGTTCAGTGGCAGTGGATCGGGCACGGACTTTACATTGAAAATCAGCAGAGT |
| | | | GGAGGCTGAGGATGTTGGGGTTTACTACTGCATGCAAGGTCTACAGACTCCTCCGTACACTT |
| | | | TTGGCCAGGGGACCAAGCTGGAGATCAAAC |
| COV2- | 9180 | heavy | GAGGTGCAGTTGGTGGAGTCTGGGGGAGGCTTGGTCCAGCCTGGGGGGTCCCTGAGACTCTC |
| 180 | | | CTGTGCAGCCTCTGGATTCATCTTTAGTAACTTTTGGATGAACTGGGTCCGCCAGGCTCCAG |
| | | | GGAAGGGGCTGGAGTGGGTGGCCAACATACAGCAAGATGGAAGTGAGAAATACTATGTGGAC |
| | | | TCTGTGAAGGGCCGATTCACCATCTCCACAGACCTCGCCAAGAACTCACTGTATCTGCAAAT |
| | | | GAACAGCCTGAGAGCCGAAGACACGGCTGTGTATTACTGTGCGAGACAACACGGTGACTACG |
| | | | ACTGGTACTTTGACTACTGGGGCCAGGGAACCCTGGTCACCGTCTCCTCAG |
| | 9181 | light | GACATCCAGATGACCCAGTCTCCATCCTCCCTGTCTGCATCTGTAGGAGACAGAGTCACCAT |
| | | | CACTTGCCGGGCAAGTCAGAGCATTACCACCTATTTAAATTGGTATCAGCAGAAAGCAGGGA |
| | | | AAGCCCCTAACCTCCTGATCTATGCTCCATCCAATTTGCAAAGTGGGGTCCCATCAAGATTC |
| | | | AGTGGCAGTGGATCTGGGACAGATTTCACTCTCACCATCAGCAGTCTGCAACCTGAAGATTT |
| | | | TGGAACTTACTACTGTCAGCAGAGTTACAGTAGTCCGTTCACTTTCGGCCCTGGGACCAAAG |
| | | | TGGATATCAAAC |
| COV2- | 9182 | heavy | GAGGTGCAGTTGGTGGAGTCTGGGGGAGGCTTGGTCCAGCCTGGGGGGTCCCTGAGACTCTC |
| 181 | | | CTGTGCAGCCTCTGGATTCATCTTTAGTAACTTTTGGATGAACTGGGTCCGCCAGGCTCCAG |
| | | | GGAAGGGGCTGGAGTGGGTGGCCAACATACAGCAAGATGGAAGTGAGAAATACTATGTGGAC |
| | | | TCTGTGAAGGGCCGATTCACCATCTCCACAGACCTCGCCAAGAACTCACTGTATCTGCAAAT |
| | | | GAACAGCCTGAGAGCCGAAGACACGGCTGTGTATTACTGTGCGAGACAACACGGTGACTACG |
| | | | ACTGGTACTTTGACTACTGGGGCCAGGGAACCCTGGTCACCGTCTCCTCAG |
| | 9183 | light | GAAATAGTGTTGACGCAGTCTCCAGCCACCCTGTCTGTGTCTCCAGGGGAAAGGGTCACCCT |
| | | | CTCCTGCAGGGCCAGTCAGACTGTAAACAACAACTTAAACTGGCTCCAGCACAAACCGGGCC |
| | | | AGGCTCCCAGGCTCGTCATCATTGGTACATCTACCAGGGCCTCTGGTGTCCCAGCCAGGTTC |
| | | | AGTGGCAGTGGGTCGGGGACAGAGTTCACTCTCACCATCAGCAGCCTGCAGTCTGAGGATTA |
| | | | TGCAATTTATTACTGTCAACAGTATTATGAGTGGCCTCCGATCACCTACGGCCAAGGGACAC |
| | | | GACTGGAGATTA |
| COV2- | 9184 | heavy | CAAGTGCAGCTCCAGCAGTCGGGCCCAGGACTGGTGAGGCCTTCGGGGACCCTGTCCCTCAC |
| 182 | | | GTGCGGTGTCTCTGGTGGCTCCATCAGCAGTCCTAATTGGTGGAGTTGGGTCCGCCAGGCCC |
| | | | CAGGGAAGGGACTGGAGTGGATTGGCGAAGTCTATCCTACTGGGAACACCTACTACAACCCG |
| | | | TCCCTCAAGAGTCGAGTCACCATTTCAATAGAGGAGTCGAAGAACGAGTTCTCCCTGAACTT |
| | | | GAGCTCTGTGACCGCCGCAGACATGGGCATTTATTACTGTGCGAGAGGCGTCGTGGGAGCAA |
| | | | GCGACTTCTATTATTACGGTATGGACGTCTGGGGCCAAGGGACCGCGGTCACCGTCTCCTCA |
| | 9185 | light | TCCTATGAGCTGACACAGCCACCCTCAGTGTCAGTGTCCCCAGGACAGACGGCCAGGATCAT |
| | | | CTGCTCTGGAGATGCATTGCCAAAGCAAAATGCTTATTGGTACCAGAAGAAGCCAGGCCAGG |
| | | | CCCCTGTGTTGGTGATATTTAAAGACAGTGAGAGGCCCTCAGGCATCCCTCAGCGATTCTCT |
| | | | GGCTCCAGCTCGGGGACAACAGTCACGTTGACCATCAGTGGAGTCCAGGCAGAAGACGAGGC |
| | | | TGACTATTACTGTCAATCAGCAGACAGCAGTGGTACTTATGTGGTATTCGGCGGAGGGACCA |
| | | | AGCTGACCGTCCTAG |
| COV2- | 9186 | heavy | CAGGTGCAGCTGCAGGAGTCGGGCCCAGGACTGGTGAAGCCTTCGGAGACCCTGTCCCTCAC |
| 183 | | | CTGCACTGTCTCTGGTGGCTCCATCAGTAGTTACTACTGGAGCTGGATCCGGCAGCCCCCAG |
| | | | GGAAGGGACTGGAGTACATTGGCTATATCTATTACAGTGGGAGCACCAACTACAACCCCTCC |
| | | | CTCAAGAGTCGAGTCACCATATCAGTAGACACGTCCAAGAACCAGTTATCCCTGAAGCTGAG |
| | | | GTCTGTGACCGCTGCGGACACGGCCGTGTATTACTGTGCGAGGGGGTTTGACTATTGGGGCC |
| | | | AGGGAACCCTGGTCACCGTCTCCTCAG |
| | 9187 | light | GAAATTGTGTTGACGCAGTCTCCAGGCACCCTGTCTTTGTCTCCAGGGGAAAGAGCCACCCT |
| | | | CTCCTGCAGGGCCAGTCAGAGTGTTAGCAGCAGCTACTTAGCCTGGTACCAGCAGAAACCTG |
| | | | GCCAGGCTCCCAGGCTCCTCATCTATGGTACATCCAGCAGGGCCACTGGCATCCCAGACAGG |
| | | | TTCAGTGGCAGTGGGTCTGGGACAGACTTCACTCTCACCATCAGCAGACTGGAGCCTGAAGA |
| | | | TTTTGCAGTGTTTTACTGTCAGCAGTATGGTAACTCTCCGTGGACGTTCGGCCAAGGGACCA |
| | | | AGGTGGAAATCAAAC |
| COV2- | 9188 | heavy | GAGGTGCAGCTGGTGGAGTCTGGGGGAGGCTTGGTCCAGCCTGGGGGGTCCCTGACACTCTC |
| 184 | | | CTGTGCAGCCTCTGGTTTGACCATTAGAAACTATTGGATGAACTGGGTCCGCCAGGCTCCAG |
| | | | GGAAGGGGCTGGAGTGGGTGGCCAACATGGAAGAAGATGGAAGTGAGAAAAACTATGTGGAC |
| | | | TCTGTGAAGGGCCGATTCATCATCTCCAGAGACGACGCCAAGAACTCACTATATCTACAAAT |
| | | | GAACAGCCTGAGAGCCGAGGACACGGCTGTATATTACTGTACGAGAGATCCCGGTCCCGGGG |
| | | | ATTTTTCGTGGGGCCAGGGAACCGTGGTAACCGTCTCCTCAG |
| | 9189 | light | GAAATTGTGTTGACACAGTCTCCAGCCACCCTGTCTTTGTCTCCAGGGGAAAGAGCCACCCT |
| | | | CTCCTGCAGGGCCAGTCAGAGTGTTAGCAGCTACTTAGCCTGGTACCAACAGAAACCTGGCC |
| | | | AGGCTCCCAGGCTCCTCATTTTTGATGCATCCAACAGGGCCACTGGCATCCCAGCCAGGTTC |
| | | | AGTGGCAGTGGGTCTGGGACAGACTTCACTCTCACCATCAGCAGCCTAGAGCCTGAAGATTT |
| | | | TGCAGTTTATTTCTGTCAGCAGCGTAGCAGCTGGCAGGGGATCACTTTCGGCGGAGGGACCA |
| | | | AGGTGGAGATCAAAC |
| COV2- | 9190 | heavy | GAGGTGCAGTTGGTGGAGTCTGGGGGAGGCTTGGTCCAGCCTGGGGGGTCCCTGAGACTCTC |
| 185 | | | CTGTGCAGCCTCTGGATTCATCTTTAGTAACTTTTGGATGAACTGGGTCCGCCAGGCTCCAG |
| | | | GGAAGGGGCTGGAGTGGGTGGCCAACATACAGCAAGATGGAAGTGAGAAATACTATGTGGAC |
| | | | TCTGTGAAGGGCCGATTCACCATCTCCACAGACCTCGCCAAGAACTCACTGTATCTGCAAAT |
| | | | GAACAGCCTGAGAGCCGAAGACACGGCTGTGTATTACTGTGCGAGACAACACGGTGACTACG |
| | | | ACTGGTACTTTGACTACTGGGGCCAGGGAACCCTGGTCACCGTCTCCTCAG |
| | 9191 | light | GAAATTGTGTTGACACAGTCTCCAGCCACCCTGTCTTTGTCTCCAGGGGAAAGAGCCACCCT |
| | | | CTCCTGCAGGGCCAGTCAGAGTGTTAGCAGCTACTTAGCCTGGTACCAACAGAAACCTGGCC |
| | | | AGGCTCCCAGGCTCCTCATTTTTGATGCATCCAACAGGGCCACTGGCATCCCAGCCAGGTTC |
| | | | AGTGGCAGTGGGTCTGGGACAGACTTCACTCTCACCATCAGCAGCCTAGAGCCTGAAGATTT |
| | | | TGCAGTTTATTTCTGTCAGCAGCGTAGCAGCTGGCAGGGGATCACTTTCGGCGGAGGGACCA |
| | | | AGGTGGAGATCAAAC |
| COV2- | 9192 | heavy | CAAGTGCAGCTCCAGCAGTCGGGCCCAGGACTGGTGAGGCCTTCGGGGACCCTGTCCCTCAC |
| 186 | | | GTGCGGTGTCTCTGGTGGCTCCATCAGCAGTCCTAATTGGTGGAGTTGGGTCCGCCAGGCCC |
| | | | CAGGGAAGGGACTGGAGTGGATTGGCGAAGTCTATCCTACTGGGAACACCTACTACAACCCG |
| | | | TCCCTCAAGAGTCGAGTCACCATTTCAATAGAGGAGTCGAAGAACGAGTTCTCCCTGAACTT |
| | | | GAGCTCTGTGACCGCCGCAGACATGGGCATTTATTACTGTGCGAGAGGCGTCGTGGGAGCAA |
| | | | GCGACTTCTATTATTACGGTATGGACGTCTGGGGCCAAGGGACCGCGGTCACCGTCTCCTCA |
| | 9193 | light | GAAATTGTGTTGACACAGTCTCCAGCCACCCCGTCTTTGTCTCCAGGGGAAAGAGCCACCCT |
| | | | CTCCTGCAGGGCCAGTCAGAGTGTTAGCAGCTACTTAGCCTGGTACCAACAGAAACCTGGCC |
| | | | AGGCTCCCAGGCTCCTCATTTTTGATGCATCCAACAGGGCCACTGGCATCCCAGCCAGGTTC |
| | | | AGTGGCAGTGGGTCTGGGACAGACTTCACTCTCACCATCAGCAGCCTGGAGTCTGAAGATTT |
| | | | TGGAACTTATTACTGTCAGCAGTATAATCACTGGCGGACGTTCGGCCAAGGGACCAAGGTGG |
| | | | AAATCAAAC |
| COV2- | 9194 | heavy | GAGGTGCAGCTGGTGGAGTCTGGGGGAGGCTTGGTCCAGCCTGGGGGGTCCCTGACACTCTC |
| 187 | | | CTGTGCAGCCTCTGGTTTGACCATTAGAAACTATTGGATGAACTGGGTCCGCCAGGCTCCAG |
| | | | GGAAGGGGCTGGAGTGGGTGGCCAACATGGAAGAAGATGGAAGTGAGAAAAACTATGTGGAC |
| | | | TCTGTGAAGGGCCGATTCATCATCTCCAGAGACGACGCCAAGAACTCACTATATCTACAAAT |
| | | | GAACAGCCTGAGAGCCGAGGACACGGCTGTATATTACTGTACGAGAGATCCCGGTCCCGGGG |
| | | | ATTTTTCGTGGGGCCAGGGAACCGTGGTAACCGTCTCCTCAG |
| | 9195 | light | GAGATCGTGATGACCCAGTCTCCAGACTCCCTGACTGTGTCTCTGGGCGAGAGGGCCACCAT |
| | | | CAGCTGCAAGTCCAGCCAGAGTCTTTTATACAGTTCCAACAATAGGGACTACTTAGCTTGGT |
| | | | ACCAACAGAAAGCAGGTCAGCCTCCTAAGTTGCTCTTTTACTGGGCATCTACCCGGGAATCC |
| | | | GGGGTCCCTGACCGATTCGGTGGCAGCGGGTCTGGGACACATTTCACTCTCACCATCTACAA |
| | | | CCTGCAGCCTGAAGATGTGGCAGTTTATTTCTGTCAGCAGTATTTTAGTCCTCCGTATACTT |
| | | | TTGGCCAGGGGACCAAGCTGGAGATCAAAC |
| COV2- | 9196 | heavy | GAGGTGCAGTTGGTGGAGTCTGGGGGAGGCTTGGTCCAGCCTGGGGGGTCCCTGAGACTCTC |
| 188 | | | CTGTGCAGCCTCTGGATTCATCTTTAGTAACTTTTGGATGAACTGGGTCCGCCAGGCTCCAG |
| | | | GGAAGGGGCTGGAGTGGGTGGCCAACATACAGCAAGATGGAAGTGAGAAATACTATGTGGAC |
| | | | TCTGTGAAGGGCCGATTCACCATCTCCACAGACCTCGCCAAGAACTCACTGTATCTGCAAAT |
| | | | GAACAGCCTGAGAGCCGAAGACACGGCTGTGTATTACTGTGCGAGACAACACGGTGACTACG |
| | | | ACTGGTACTTTGACTACTGGGGCCAGGGAACCCTGGTCACCGTCTCCTCAG |
| | 9197 | light | GAAATTGTGTTGACGCAGTCTCCAGGCACCCTGTCTTTGTCTCCAGGGGAAAGAGCCACCCT |
| | | | CTCCTGCAGGGCCAGTGAGAGTGTCAGTAGTAACTACTTAGCCTGGTACCAGCAGAAGCCTG |
| | | | GCCAGGCTCCCAGGCTCCTCATCTACGATGCATCCAGCAGGGCCACTGGCATCCCAGACAGG |
| | | | TTCAGTGGCAGTGGGTCTGGGACAGACTTCACTCTCACCATCAGCAAACTGGAGCCTGAAGA |
| | | | TTTTGCAGTATATTACTGTCAGCAGTATGCTCGGGCCCCGGACACCTTCGCCCAAGGGACAC |
| | | | GACTGGAGATTAAAC |
| COV2- | 9198 | heavy | CAAATGCAGCTGGTGCAGTCTGGGGCTGAGGTGAAGAAGCCTGGGTCCTCGGTGAAGGTCTC |
| 189 | | | CTGCAAGGCTTCTGGAGGCACCTTCATCAATTATGCTATCAACTGGGTGCGACAGGCCCCTG |
| | | | GACAACGACTTGAGTACATGGGAGGGATCATCCCTCTTCTTGGTGTTGCAAACTACACACAG |
| | | | CGATTCCAGGGCAGAGTCACGATGACCGCGGACAGATCTACGAGCACAGCCTACATGGAGCT |
| | | | GAGTAATCTGGCAATTGAAGACACGGCCGTGTATTACTGTGCGAGAGAGTATAGCAGCAGCC |
| | | | GGCCCTTATTTTACACCTACAACTACGGTATGGACGTCTGGGGCCAAGGGACCACGGTCACC |
| | | | GTCTCCTCA |
| | 9199 | light | GATATTGTGATGACCCAGACTCCACTCTCTCTGTCCGTCACCCCTGGACAGCCGGCCTCCAT |
| | | | CTCCTGCAAGTCTAGTCAGGGCCTCCTGCATGGTGATGGGAAGACCTATTTGTATTGGTTCT |
| | | | TGCAGAAGGCAGGCCAGCCTCCACAACTCCTGATCTATGAAGTTTCAAACCGCTTCTCCGGA |
| | | | GTGCCAGATAGATTCAGCGGCAGCGGGTCAGGGACAGATTTCACACTGAAAATCAGCCGGGT |
| | | | GGAGGCTGAGGATGTTGGGATTTATTATTGCATGCAAAGTGTACACCTTCCGTACACTTTTG |
| | | | GCCAGGGGACCAAGTTGGAGATCAAAC |
| COV2- | 9200 | heavy | GAGGTGCAGCTGGTGGAGTCTGGGGGAGGCTTGGTCCAGCCTGGGGGGTCCCTGACACTCTC |
| 190 | | | CTGTGCAGCCTCTGGTTTGACCATTAGAAACTATTGGATGAACTGGGTCCGCCAGGCTCCAG |
| | | | GGAAGGGGCTGGAGTGGGTGGCCAACATGGAAGAAGATGGAAGTGAGAAAAACTATGTGGAC |
| | | | TCTGTGAAGGGCCGATTCATCATCTCCAGAGACGACGCCAAGAACTCACTATATCTACAAAT |
| | | | GAACAGCCTGAGAGCCGAGGACACGGCTGTATATTACTGTACGAGAGATCCCGGTCCCGGGG |
| | | | ATTTTTCGTGGGGCCAGGGAACCGTGGTAACCGTCTCCTCAG |
| | 9201 | light | TCCTATGAGCTGACTCAGCCACCCTCAGTGTCCGTGTCCCCAGGACAGACAGCCAGCATCAC |
| | | | CTGCTCTGGAGATAAATTGGGGGAGAAATATGCTTGCTGGTATCAGCAGAAGCCAGGCCAGT |
| | | | CCCCTGTGTTGGTCATTTATCAAGATACCAAGCGGCCCTCAGGGATCCCTGAGCGATTCTCT |
| | | | GGCTCCAACTCTGGGAACACAGCCACGCTGACCATCAGCGGGACCCAGGCTGTGGATGAGGC |
| | | | TGACTATTACTGTCAGGCGTGGGACTACACCACCGTGATATTCGGCGGAGGGACCAAGCTGA |
| | | | CCGTCCTAG |
| COV2- | 9202 | heavy | GAGGTGCAGCTGGTGGAGTCTGGGGGAGGCTTGGTCCAGCCTGGGGGGTCCCTGACACTCTC |
| 191 | | | CTGTGCAGCCTCTGGTTTGACCATTAGAAACTATTGGATGAACTGGGTCCGCCAGGCTCCAG |
| | | | GGAAGGGGCTGGAGTGGGTGGCCAACATGGAAGAAGATGGAAGTGAGAAAAACTATGTGGAC |
| | | | TCTGTGAAGGGCCGATTCATCATCTCCAGAGACGACGCCAAGAACTCACTATATCTACAAAT |
| | | | GAACAGCCTGAGAGCCGAGGACACGGCTGTATATTACTGTACGAGAGATCCCGGTCCCGGGG |
| | | | ATTTTTCGTGGGGCCAGGGAACCGTGGTAACCGTCTCCTCAG |
| | 9203 | light | GAAATTGTGTTGACGCAGTCTCCAGGCACCCTGTCTTTGTCTCCAGGGGAAAGAGCCACCCT |
| | | | CTCCTGCAGGGCCAGTCAGAGTGTTAGCAGCAGCTACTTAGCCTGGTACCAGCAGAAACCTG |
| | | | GCCAGGCTCCCAGGCTCCTCATCTATGGTGCATCCAGCAGGGCCACTGGCATCCCAGACAGG |
| | | | TTCAGTGGCAGTGGGTCTGGGACAGACTTCACTCTCACCATCAGCAGACTGGAGCCTGAAGA |
| | | | TTTTGCAGTGTATTACTGTCAGCAGTATGGTAGCTCTTACACTTTTGGCCAGGGGACCAAGC |
| | | | TGGAGATCAAAC |
| COV2- | 9204 | heavy | GAGGTGCAGCTGGTGGAGTCTGGGGGAGGCTTGGTCCAGCCTGGGGGGTCCCTGACACTCTC |
| 192 | | | CTGTGCAGCCTCTGGTTTGACCATTAGAAACTATTGGATGAACTGGGTCCGCCAGGCTCCAG |
| | | | GGAAGGGGCTGGAGTGGGTGGCCAACATGGAAGAAGATGGAAGTGAGAAAAACTATGTGGAC |
| | | | TCTGTGAAGGGCCGATTCATCATCTCCAGAGACGACGCCAAGAACTCACTATATCTACAAAT |
| | | | GAACAGCCTGAGAGCCGAGGACACGGCTGTATATTACTGTACGAGAGATCCCGGTCCCGGGG |
| | | | ATTTTTCGTGGGGCCAGGGAACCGTGGTAACCGTCTCCTCAG |
| | 9205 | light | GAAATTGTGTTGACACAGTCTCCAGCCACCCTGTCTTTGTCTCCAGGGGAAAGAGCCACCCT |
| | | | CTCCTGCAGGGCCAGTCAGAGTGTTAGCAGCTACTTAGCCTGGTACCAACAGAAACCTGGCC |
| | | | AGGCTCCCAGGCTCCTCATTTTTGATGCATCCAACAGGGCCACTGGCATCCCAGCCAGGTTC |
| | | | AGTGGCAGTGGGTCTGGGACAGACTTCACTCTCACCATCAGCAGCCTGCAGCCTGAAGATTT |
| | | | TGCAACTTATTATTGCCAACAGTATCGTAGTTACCCTCGGACTTTTGGCCAGGGGACCAAGC |
| | | | TGGAGATCAAAC |
| COV2- | 9206 | heavy | GAGGTGCAGCTGGTGGAGTCTGGGGGAGGCTTGGTCCAGCCTGGGGGGTCCCTGACACTCTC |
| 193 | | | CTGTGCAGCCTCTGGTTTGACCATTAGAAACTATTGGATGAACTGGGTCCGCCAGGCTCCAG |
| | | | GGAAGGGGCTGGAGTGGGTGGCCAACATGGAAGAAGATGGAAGTGAGAAAAACTATGTGGAC |
| | | | TCTGTGAAGGGCCGATTCATCATCTCCAGAGACGACGCCAAGAACTCACTATATCTACAAAT |
| | | | GAACAGCCTGAGAGCCGAGGACACGGCTGTATATTACTGTACGAGAGATCCCGGTCCCGGGG |
| | | | ATTTTTCGTGGGGCCAGGGAACCGTGGTAACCGTCTCCTCAG |
| | 9207 | light | GACATCCAGATGACCCAGTCTCCATCCTCCCTGTCTGCATCTGTAGGAGACAGAGTCACCAT |
| | | | CACTTGCCGGGCAAGTCAGAGCATTACCACCTATTTAAATTGGTATCAGCAGAAAGCAGGGA |
| | | | AAGCCCCTAACCTCCTGATCTATGCTCCATCCAATTTGCAAAGTGGGGTCCCATCAAGATTC |
| | | | AGTGGCAGTGGATCTGGGACAGATTTCACTCTCACCATCAGCAGTCTGCAACCTGAAGATTT |
| | | | TGGAACTTACTACTGTCAGCAGAGTTACAGTAGTCCGTTCACTTTCGGCCCTGGGACCAAAG |
| | | | TGGATATCAAAC |
| COV2- | 9208 | heavy | CAGGTGCAGCTGGAGCAGTCTGGGGCTGAGGTGAAGAGGCCTGGGTCTTCGGTGAAGGTCTC |
| 194 | | | CTGCAAGGGTGATGGGGACACATTCAGCACATATGCCATCACCTGGGTGCGACAGGCCCCTG |
| | | | GACAAGGGCTTGAGTGGATGGGGAGGATCATCCCTGGCCTTGACCTGGTGGATAATCAACAG |
| | | | AAGTTTCAGGACAGACTGACAATTACCGCGGACAAATCCACGACCACAGCCTACATGGAGCT |
| | | | GAGAAGCCTCAGATCTGAAGACACGGCCGTATATTATTGTGCGAGAGGTAGACGTTACGATT |
| | | | TTTTGGATGGTCAATATACGTCATGGTACTTCGACATTTGGGGCCGTGGCACCCTGGTCACT |
| | | | GTCTCCTCAG |
| | 9209 | light | AATATTGTGATGACTCAGTCTCCACTCTCCCTGCCCGTCACCCCTGGAGAGCCGGCCTCCAT |
| | | | GTCCTGCAGGTCTAATCAGAGCCTCCTGTATGGTAATGGATACAACTATTTGGATTGGTACC |
| | | | TGCAGAGACCAGGGCAGTCTCCACAGCTCCTAATCTTTTTGGGTTCTAATCGGGCCTCCGGG |
| | | | GTCCCTGACAGGTTCAGTGGCAGTGGATCAGGCACAGATTTTACACTGAAAATCAACAGAGT |
| | | | GGAGGCTGAGGATGTGGGAATTTATTACTGCATGCAAGGTCAAGAGAATCCTCCAACTTTTG |
| | | | GCCCTGGGACCAAAGTGGAGATCAAAC |
| COV2- | 9210 | heavy | GAGGTGCAGCTGTTGGAGTCTGGGGGAGGCTTGGTACAGCCTGGGGGGTCCCTGAGACTCTC |
| 195 | | | CTGTGCAGCCTCTGGATTCACCTTTAGCAGCTATGCCGTGTACTGGGTCCGCCAGGCTCCAG |
| | | | GGAAGGGGCTGGAGTGCGTCTCATTTATTAGTGGTGGTGGTGAAACCACAGACTACGCAGAC |
| | | | TCCGTGAAGGGCCGGTTCACCATCTCCAGAGACAATTCCAAGAACACGTTGTATCTGCAAAT |
| | | | GAACGGCCTGAGAGCCGAGGACACGGCCGTATATTACTGTGCGAAATCCCCGGACGCAACAT |
| | | | TTCTGTGGTTCGGGGAGCCCTTCGGCTACTGGGGCCAGGGAACCCTGGTCACCGTCTCCTCA |
| | | | G |
| | 9211 | light | GAAATAGTGATGACGCAGTCTCCAGCCACCCTGTCTGTGTCTCCAGGGGAAAGAGCCACCCT |
| | | | CTCCTGCAGGGCCAGTCAGAGTGTTAGCAGCAACTTAGCCTGGTACCAGCAGAAACCTGGCC |
| | | | AGGCTCCCAGGCTCCTCATCTATGGTGCATCCACCAGGGCCACTGGTATCCCAGCCAGGTTC |
| | | | AGTGGCAGTGGGTCTGGGACAGACTTCACTCTCACCATCAGCAGCCTGCAGTCTGAAGATTT |
| | | | TGCAGTTTATTACTGTCAGCAGTATAATAACTGGCGGACGTTCGGCCAAGGGACCAAGGTGG |
| | | | AAATCAAAC |
| CR3022 | 9212 | heavy | CAGATGCAACTGGTGCAGAGCGGGACCGAGGTGAAAAAACCCGGCGAGTCCTTGAAGATTAG |
| | | | TTGCAAAGGTTCAGGTTATGGATTCATTACCTACTGGATAGGATGGGTAAGACAAATGCCAG |
| | | | GTAAAGGTTTGGAGTGGATGGGGATAATATACCCTGGGGATTCTGAGACAAGATACTCCCCC |
| | | | AGCTTCCAGGGTCAGGTAACTATATCTGCAGATAAAAGTATAAACACTGCCTATCTTCAGTG |
| | | | GTCCTCACTGAAAGCATCTGACACTGCTATCTACTACTGTGCCGGAGGTAGTGGCATATCAA |
| | | | CTCCAATGGACGTATGGGGTCAAGGGACAACTGTCACCGTCTCC |
| | 9213 | light | TCTGTACTCTACAGCAGCATCAATAAAAATTACCTCGCATGGTATCAGCAAAAGCCAGGACA |
| | | | ACCCCCAAAACTTCTCATATATTGGGCAAGTACACGGGAGTCTGGCGTCCCCGATAGGTTTT |
| | | | CTGGTAGTGGGAGTGGTACTGACTTTACCCTTACCATATCATCACTTCAAGCCGAGGATGTC |
| | | | GCTGTGTACTACTGCCAACAATATTATTCAACCCCTTATACATTCGGCCAGGGCACAAAGGT |
| | | | AGAAATTAAA |
| COV2- | 9214 | heavy | CAGGTGCAGCTGCAGGAGTCGGGCCCAGGACTGGTGAAGCCTTCACAGACCCTGTCCCTCAC |
| 122 | | | CTGCACTGTCTCTGGTGGCTCCATCAGCAGTGGTAGTCACTACTGGAGCTGGATTCGGCAGC |
| | | | CCGCCGGAAAGGGACTGGAGTGGGTCGGGCGTATCTATACCAGTGGGAGCACCAACTACAAC |
| | | | CCCTCCCTCGAGCGTCGAGTCACCATATCACTAGGCACGTCCAAGAACCAGTTCTACCTTGA |
| | | | TCTGACCTCTGTGACCGCCGCAGACACGGCCGTGTATTACTGTGCGAGAGATTCCTTGAGTG |
| | | | GTTCTTACCACTACTACTACGGTATGGACGTCTGGGGCCAAGGGACCTCGGTCACCGTCTCC |
| | | | TCA |
| | 9215 | light | CAGTCTGTGCTGACTCAGCCACCCTCAGCGTCTGGGACCCCCGGGCAGAGGGTCACCATCTC |
| | | | TTGTTCTGGAAGCAGTTCCAACATCGGAAGTAATTATGTTTACTGGTACCAGCACCTCCCAG |
| | | | GAACGGCCCCCAAACTCCTCATCTATAGGAATTATCAGCGGCCCTCAGGGGTCCCTGACCGA |
| | | | TTCTCTGGCTCCAAGTCTGGCACCTCAGCCTCCCTGGCCATCAGTGGGCTCCGGTCCGAGGA |
| | | | TGAGGGTGATTATTATTGTGCAGTTTGGGATGACAGCCTGAGTGGTTGGGTGTTCGGCGGAG |
| | | | GGACCAAGCTGACCGTCCTAG |
| COV2- | 9216 | heavy | CAGGTGCAACTGGTGGAGTCTGGGGGAGGCGTGGTCCAGCCTGGGAGGTCCCTGAGACTCTC |
| 123 | | | CTGTGCAGCCTCTGGATTCACCTTCATTAGCTATACTATGCACTGGGTCCGCCAGGCTCCAG |
| | | | GCAAGGGGCTGGAGTGGGTGGCACTTATATCATATGATGGATACAATAAGTACTATGCAGAC |
| | | | TCCGTGAAGGGCCGATTTACCATCTCCAGAGACAATTCCAAGAACACGCTGTATGTGCAAAT |
| | | | GAACAGCCTGAGAGCTGAGGACACGGCTCTGTATTACTGTGCGAGAGAAGGGAGCCCGGAGG |
| | | | CCTTTGACTACTGGGGCCAGGGAACCCTGGTCACCGTCTCCTCAG |
| | 9217 | light | GAAATAGTGTTGACGCAGTCTCCAGCCACCCTGTCTGTGTCTCCAGGGGAAAGGGTCACCCT |
| | | | CTCCTGCAGGGCCAGTCAGACTGTAAACAACAACTTAAACTGGCTCCAGCACAAACCGGGCC |
| | | | AGGCTCCCAGGCTCGTCATCATTGGTACATCTACCAGGGCCTCTGGTGTCCCAGCCAGGTTC |
| | | | AGTGGCAGTGGGTCGGGGACAGAGTTCACTCTCACCATCAGCAGCCTGCAGTCTGAGGATTA |
| | | | TGCAATTTATTACTGTCAACAGTATTATGAGTGGCCTCCGATCACCTACGGCCAAGGGACAC |
| | | | GACTGGAGATTA |
| COV2- | 9218 | heavy | GAGGTGCAGCTGGTGGAGTCTGGGGGAGGCTTGGTCCAGCCGGGGGGGTCCCGGAGACTCTC |
| 124 | | | CTGTGGAGCCTCTGGATTCACCTTTACTAATCATTGGATGAGCTGGGTCCGCCAGGCTCCAG |
| | | | GGAAGGGGCTGGAGTGGGTGGCCAGCATAAAGCAAGATGGAGCTGAGAAATACTATGTGGAC |
| | | | TATCTGAAGGGCCGATTCACCATCTCCAGAGACAACGCCAAGAATTCACTGTATCTGCAAAT |
| | | | GAACAGCCTGAGAGTCGAGGACACGGCTGTTTATTACTGTGCGAGACGTATCACGATGGCAC |
| | | | TGGCTGGTTGGGGTTGGGGTATGGACGTCTGGGGCCAAGGGACCACGGTCAGAGTCTCCTCA |
| | 9219 | light | GATATTGTGATGACTCAGTCTCCACTCTCCCTGCCCGTCACCCCTGGAGAGCCGGCCTCCAT |
| | | | CTCCTGCAGGTCTAGTCGGAGTCTCTTGTCTAGGAATGGATACAACTATTTGGATTGGTACC |
| | | | TGCAGAGGCCAGGGCAGTCTCCACAGCTCGTGATCTATTTGGGTTCTAATCGGGCCTCCGGG |
| | | | GTCCCTGACAGGTTCAGTGGCAGTGGATCAGGCACAGATTTTACACTGAAAATCAGCAGAGT |
| | | | GGAGGCTGAGGATGTTGGGCTTTATTACTGCATGCAAGCTATGCAAGCTCCTCTCACTTTCG |
| | | | GCCCGGGGACCAAAGTGGAAATCAAAC |
| COV2- | 9220 | heavy | CAGGTGCAGCTGGTACAATCTGGGTCTGAATTGAAGAAGCCTGGGGCCTCAGTGAAGGTTTC |
| 125 | | | CTGCAAGACTTCTGGATACACCTTCACTAGTTATGCTATAAATTGGGTGCGACAGGCCCCTG |
| | | | GACAAGGGCTTGAGTGGATCGGATGGATCAACATCAACACTGGGAACCCAACGTATGCCCAG |
| | | | GGCTTCACAGGACGGGTTGACTTCTCCTTGGACACCTCTGTCAGCACGGCATATCTGCAGAT |
| | | | CAGAAGCCTAAAGGCTGAGGACACTGCTGTGTATTACTGTGCGAGAGATCGGGGTATAGCAG |
| | | | CTCGTCGGGGATACTACTACTACGGTATGGACGTCTGGGGCCAAGGGACCACGGTCACCGTC |
| | | | TCCTCA |
| | 9221 | light | TCCTATGAGCTGACACAGCCACCCTCAGTGTCAGTGTCCCCAGGACAGACGGCCAGGATCAT |
| | | | CTGCTCTGGAGATGCATTGCCAAAGCAAAATGCTTATTGGTACCAGAAGAAGCCAGGCCAGG |
| | | | CCCCTGTGTTGGTGATATTTAAAGACAGTGAGAGGCCCTCAGGCATCCCTCAGCGATTCTCT |
| | | | GGCTCCAGCTCGGGGACAACAGTCACGTTGACCATCAGTGGAGTCCAGGCAGAAGACGAGGC |
| | | | TGACTATTACTGTCAATCAGCAGACAGCAGTGGTACTTATGTGGTATTCGGCGGAGGGACCA |
| | | | AGCTGACCGTCCTAG |
| COV2- | 9222 | heavy | CAGGTGCAGCTGGAGCAGTCTGGGGCTGAGGTGAAGAGGCCTGGGTCTTCGGTGAAGGTCTC |
| 126 | | | CTGCAAGGGTGATGGGGACACATTCAGCACATATGCCATCACCTGGGTGCGACAGGCCCCTG |
| | | | GACAAGGGCTTGAGTGGATGGGGAGGATCATCCCTGGCCTTGACCTGGTGGATAATCAACAG |
| | | | AAGTTTCAGGACAGACTGACAATTACCGCGGACAAATCCACGACCACAGCCTACATGGAGCT |
| | | | GAGAAGCCTCAGATCTGAAGACACGGCCGTATATTATTGTGCGAGAGGTAGACGTTACGATT |
| | | | TTTTGGATGGTCAATATACGTCATGGTACTTCGACATTTGGGGCCGTGGCACCCTGGTCACT |
| | | | GTCTCCTCAG |
| | 9223 | light | TCCTATGAGCTGACACAGCCACCCTCAGTGTCAGTGTCCCCAGGACAGACGGCCAGGATCAT |
| | | | CTGCTCTGGAGATGCATTGCCAAAGCAAAATGCTTATTGGTACCAGAAGAAGCCAGGCCAGG |
| | | | CCCCTGTGTTGGTGATATTTAAAGACAGTGAGAGGCCCTCAGGCATCCCTCAGCGATTCTCT |
| | | | GGCTCCAGCTCGGGGACAACAGTCACGTTGACCATCAGTGGAGTCCAGGCAGAAGACGAGGC |
| | | | TGACTATTACTGTCAATCAGCAGACAGCAGTGGTACTTATGTGGTATTCGGCGGAGGGACCA |
| | | | AGCTGACCGTCCTAG |
| COV2- | 9224 | heavy | CAGGTGCAGCTGCAGGAGTCGGGCCCAGGACTGGTGAAGCCTTCGGAGACCCTGTCCCTCAC |
| 127 | | | CTGCACTGTCTCTGGTGGCTCCATCAGTAGTTACTACTGGAGCTGGATCCGGCAGCCCCCAG |
| | | | GGAAGGGACTGGAGTACATTGGCTATATCTATTACAGTGGGAGCACCAACTACAACCCCTCC |
| | | | CTCAAGAGTCGAGTCACCATATCAGTAGACACGTCCAAGAACCAGTTATCCCTGAAGCTGAG |
| | | | GTCTGTGACCGCTGCGGACACGGCCGTGTATTACTGTGCGAGGGGGTTTGACTATTGGGGCC |
| | | | AGGGAACCCTGGTCACCGTCTCCTCAG |
| | 9225 | light | TCCTATGAGCTGACACAGCCACCCTCAGTGTCAGTGTCCCCAGGACAGACGGCCAGGATCAT |
| | | | CTGCTCTGGAGATGCATTGCCAAAGCAAAATGCTTATTGGTACCAGAAGAAGCCAGGCCAGG |
| | | | CCCCTGTGTTGGTGATATTTAAAGACAGTGAGAGGCCCTCAGGCATCCCTCAGCGATTCTCT |
| | | | GGCTCCAGCTCGGGGACAACAGTCACGTTGACCATCAGTGGAGTCCAGGCAGAAGACGAGGC |
| | | | TGACTATTACTGTCAATCAGCAGACAGCAGTGGTACTTATGTGGTATTCGGCGGAGGGACCA |
| | | | AGCTGACCGTCCTAG |
| COV2- | 9226 | heavy | CAGGTGCAGCTTCAGCAGTGGGGCGCAGGACTTTTGAAGCCTTCGGAAACCCTGTCCCTCAC |
| 128 | | | CTGCGCTGTCCACGGTGGGTCCTTCAGTGGTCCCTACTGGACCTGGATCCGCCAGTCGCCAA |
| | | | GTCAGGGGCTGGAGTGGATTGGAGAAATCGGTCCTCGTGGGATCACCTACTACAGCCCGTCC |
| | | | CTCGAGAGTCGAGTCACCATATCAGCAGACACGTCCAGGAATCAGTTCTCCCTGAGGCTGAC |
| | | | GTCTGTGACCGCCGCGGACACGGCTGTCTATTACTGTGCGAGAGGCTTGGTTATTGGAAGAA |
| | | | GCAGCCTAAACTTTGACTCTTGGGGCCAGGGAACCCTGGTCACCGTCTCCTCAG |
| | 9227 | light | GAAATTGTGTTGACGCAGTCTCCAGGCACCCTGTCTTTGTCTCCAGGGGAAAGAGCCACCCT |
| | | | CTCCTGCAGGGCCAGTGAGAGTGTCAGTAGTAACTACTTAGCCTGGTACCAGCAGAAGCCTG |
| | | | GCCAGGCTCCCAGGCTCCTCATCTACGATGCATCCAGCAGGGCCACTGGCATCCCAGACAGG |
| | | | TTCAGTGGCAGTGGGTCTGGGACAGACTTCACTCTCACCATCAGCAAACTGGAGCCTGAAGA |
| | | | TTTTGCAGTATATTACTGTCAGCAGTATGCTCGGGCCCCGGACACCTTCGCCCAAGGGACAC |
| | | | GACTGGAGATTAAAC |
| COV2- | 9228 | heavy | GAGGTGCAACTGGTGGAGGCTGGGGGAGGCCTGGTCAAGCCTGGGGGGTCCCTGAGACTCTC |
| 129 | | | CTGTGCAGCCTCTGGATTCACCTTCAGTGGCTATGCCATAAACTGGGTCCGCCAGGCTCCAG |
| | | | GGAAGGGCCTGGAGTGGGTCTCGTCCATTAGTGGGAATAATAATGATATGTACTACGCAGAC |
| | | | TCAGTGAAGGGCCGATTCACCATCTCCAGAGACAACGCCAAGAGCTCAGTGTTTCTGCAAAT |
| | | | GAACAGCCTGAGAGTCGAGGACACGGCTATCTATTACTGTGCGAGAGATAACTTAGCACTGG |
| | | | CTGGGGAGGACTACTGGGGCCAGGGAACCCTGGTCACCGTCTCCTCAG |
| | 9229 | light | GAGATCGTGATGACCCAGTCTCCAGACTCCCTGACTGTGTCTCTGGGCGAGAGGGCCACCAT |
| | | | CAGCTGCAAGTCCAGCCAGAGTCTTTTATACAGTTCCAACAATAGGGACTACTTAGCTTGGT |
| | | | ACCAACAGAAAGCAGGTCAGCCTCCTAAGTTGCTCTTTTACTGGGCATCTACCCGGGAATCC |
| | | | GGGGTCCCTGACCGATTCGGTGGCAGCGGGTCTGGGACACATTTCACTCTCACCATCTACAA |
| | | | CCTGCAGCCTGAAGATGTGGCAGTTTATTTCTGTCAGCAGTATTTTAGTCCTCCGTATACTT |
| | | | TTGGCCAGGGGACCAAGCTGGAGATCAAAC |
| COV2- | 9230 | heavy | GAGGTGCAGCTGTTGGAGTCTGGGGGAGGCTTGGTACAGCCTGGGGGGTCCCTGAGACTCTC |
| 130 | | | CTGTGCAGCCTCTGGATTCACCTTTAGCAGCTATGCCGTGTACTGGGTCCGCCAGGCTCCAG |
| | | | GGAAGGGGCTGGAGTGCGTCTCATTTATTAGTGGTGGTGGTGAAACCACAGACTACGCAGAC |
| | | | TCCGTGAAGGGCCGGTTCACCATCTCCAGAGACAATTCCAAGAACACGTTGTATCTGCAAAT |
| | | | GAACGGCCTGAGAGCCGAGGACACGGCCGTATATTACTGTGCGAAATCCCCGGACGCAACAT |
| | | | TTCTGTGGTTCGGGGAGCCCTTCGGCTACTGGGGCCAGGGAACCCTGGTCACCGTCTCCTCA |
| | | | G |
| | 9231 | light | GAAATAGTGATGACGCAGTCTCCAGCCACCCTGTCTGTGTCTCCAGGGGAAAGAGTCACCCT |
| | | | CTCCTGCAGGGCCAGTCAGAGTGTTAGCAGCAACGTAGCCTGGTACCAGCAGAAACCTGGCC |
| | | | AGGCTCCCAGCCTCCTCATCTATGGTGCATCCACCAGGGCCACTGGTACCCCAGCCAGGTTC |
| | | | AGTGGCAGTGGGTCTGGGACAGGGTTCACTCTCACCATCACCAGCCTGCAGTCTGAAGATTT |
| | | | TGGAGTTTATTACTGTCAGCAATATAATAACTGGCGATTCACTTTCGGCCCTGGGACCAAAG |
| | | | TGGAGATCAAAC |
| COV2- | 9232 | heavy | GAGGTGCAGTTGTTGGAGTCGGGGGGAGGCTTGGTGCAGCCTGGGGGGTCCCTGAGACTCTC |
| 131 | | | CTGTGCAGCCTCTGGATTCGTCTTTAGCGACTATTCCATGAATTGGGTCCGCCTGGCTCCAG |
| | | | GAAAGGGGCTGGCGTGGGTCTCTGTTGTTGGTGTTGATGCCGTCACCAAATTCTATGAAGAC |
| | | | TCCGTGAAGGGCCGGTTCACCATTTCCAGAGACAACTCCAAGAACACGATATATCTGCAAAT |
| | | | GAACAACCTGAGAGCCGAAGACACGGCCGTATATCACTGTGCGAAAAGTCAGCCGGTGTCTC |
| | | | GCATGGGTCGCTTCTTCGTCGGTTTGGACGTCTGGGGCCAAGGGACCACGGTCACCGTCTCC |
| | | | TCA |
| | 9223 | light | GAGATCGTGATGACCCAGTCTCCAGACTCCCTGACTGTGTCTCTGGGCGAGAGGGCCACCAT |
| | | | CAGCTGCAAGTCCAGCCAGAGTCTTTTATACAGTTCCAACAATAGGGACTACTTAGCTTGGT |
| | | | ACCAACAGAAAGCAGGTCAGCCTCCTAAGTTGCTCTTTTACTGGGCATCTACCCGGGAATCC |
| | | | GGGGTCCCTGACCGATTCGGTGGCAGCGGGTCTGGGACACATTTCACTCTCACCATCTACAA |
| | | | CCTGCAGCCTGAAGATGTGGCAGTTTATTTCTGTCAGCAGTATTTTAGTCCTCCGTATACTT |
| | | | TTGGCCAGGGGACCAAGCTGGAGATCAAAC |
| COV2- | 9234 | heavy | GAGGTGCAGCTGGTGGAGTCTGGGGGAGGCCTGGTCAAGCCTGGGGGGTCCCTGAGACTCTC |
| 132 | | | CTGTGCAGCCTCTGGATTCACCTTCAGTAGTTATAGCATGAACTGGGTCCGCCAGGCTCCAG |
| | | | GGAAGGGGCTGGAGTGGGTCTCATCCATTAGTAGTACTAGTAGTTACATATACTACGCAGAC |
| | | | TCAGTGAAGGGCCGATTCACCATCTCCAGAGACAACGCCAAGAACTCACTGTATCTGCAAAT |
| | | | GAACAGCCTGAGAGCCGAGGACACGGCTGTATATTACTGTGCGAGACGTAGGGCGGCAACTG |
| | | | GTACGGAGTTCTACTTTGACTACTGGGGCCAGGGAACCCTGGTCACCGTCTCCTCAG |
| | 9235 | light | CAGTCTGTGTTGACGCAGCCGCCCTCAGTGTCTGCGGCCCCAGGACAGAAGGTCACCATCTC |
| | | | CTGCTCTGGAAGCAGCTCCAACATTGGGAATAATTATGTATCCTGGTACCAGCAGCTCCCAG |
| | | | GAACAGCCCCCAAACTCCTCATTTATGACAATAATAAGCGACCCTCAGGGATTCCTGACCGA |
| | | | TTCTCTGGCTCCAAGTCTGGCACGTCAGCCACCCTGGGCATCACCGGACTCCAGACTGGGGA |
| | | | CGAGGCCGATTATTACTGCGGAACATGGGATAGCAGCCTGAGTGCTGTGCTATTCGGCGGAG |
| | | | GGACCAAGCTGACCGTCCTAG |
| COV2- | 9236 | heavy | CAGGCACACCTGGTGCAGTCTGGGGCTGAGGTGAAGAAGCCTGGGTCCTCGGTGAAGGTCTC |
| 133 | | | CTGCAAGGCTTCTGGAGGCACCTTCAACAGTCATGCCATCGGCTGGGTGCGACAGGCCCCTG |
| | | | GACAAGGCCTTGAGTGGATGGGAAGGATCGTCCCTATCCGGAAGACCACAACTTACGCACCG |
| | | | CAGTTACAGGGCAGACTCACGCTGACCGCGGACACATCCACGAGCACACTGTACATGGAACT |
| | | | GAGTAGCCTGCGATCCGAGGACTCGGCCCGGTATTACTGTGCGAGAGTCATTCTGTCTGGGA |
| | | | GGGGCTTTGACATCTGGGGCCAGGGATCCCTGGTCGCCGTCTCCTCAG |
| | 9237 | light | GACATCCAAATGACCCAATCTCCTTCCGCCCTGGCTGCATCTCTGGGAGACAGAGTCATCAT |
| | | | CACTTGCCAGGCGAGTCACGACATTGGTCACAATTTAAATTGGTATCAGCAGAGACCAGGGG |
| | | | AAGCCCCTCAGCTCCTGATCTACGATGTATCCAATTTGCAAACAGGGGTCCCATCAAGGTTC |
| | | | AGTGGCTTTGGATTTGGGACAAATTTTACTTTCACCATCAGCGGCCTGCAGTCTGAAGATAT |
| | | | CGGAACATATTACTGTCAACAGTATGATAGTATTTTTGGCCCAGGGACCAAGTTGGAGATCA |
| | | | AAC |
| COV2- | 9238 | heavy | CAGGTCCAGCTGGTGCAGTCTGGGGCTGAGGTGAAGAAGCCTGGGTCCTCGGTGAAGGTCTC |
| 134 | | | CTGCAAGGCTTCTGGAGGCACCTTTAGCAGCTATGCTTTCAGTTGGGTGCGACAGGCCCCTG |
| | | | GACAAGGGCTTGAGTGGATGGGAAGGATCATCCTTATTCTTGGTATAACAGACTACGCACCG |
| | | | AAGTTCCAGGGCAGAGTCACGATTACCGCGGACAAATCCACGAGCACAGTGTACATGGAGGT |
| | | | GAGCAGCCTGAGATCGGACGACACGGCCGTGTATTACTGTGCGAGAGAAAGGCCAAGAGACC |
| | | | CCTCCAGTAACTACGTTGCCTACTACGCTATGGACGTCTGGGGCCAAGGGACCTCGGTCACC |
| | | | GTCTCGTCA |
| | 9239 | light | GACATCCAGATGACCCAGTCTCCATCCTCCCTGTCTGCATCTGTAGGAGACAGAGTCACCAT |
| | | | CACTTGCCGGGCAAGTCAGAGCATTACCACCTATTTAAATTGGTATCAGCAGAAAGCAGGGA |
| | | | AAGCCCCTAACCTCCTGATCTATGCTCCATCCAATTTGCAAAGTGGGGTCCCATCAAGATTC |
| | | | AGTGGCAGTGGATCTGGGACAGATTTCACTCTCACCATCAGCAGTCTGCAACCTGAAGATTT |
| | | | TGGAACTTACTACTGTCAGCAGAGTTACAGTAGTCCGTTCACTTTCGGCCCTGGGACCAAAG |
| | | | TGGATATCAAAC |
| COV2- | 9240 | heavy | CAAGTGCAGCTCCAGCAGTCGGGCCCAGGACTGGTGAGGCCTTCGGGGACCCTGTCCCTCAC |
| 135 | | | GTGCGGTGTCTCTGGTGGCTCCATCAGCAGTCCTAATTGGTGGAGTTGGGTCCGCCAGGCCC |
| | | | CAGGGAAGGGACTGGAGTGGATTGGCGAAGTCTATCCTACTGGGAACACCTACTACAACCCG |
| | | | TCCCTCAAGAGTCGAGTCACCATTTCAATAGAGGAGTCGAAGAACGAGTTCTCCCTGAACTT |
| | | | GAGCTCTGTGACCGCCGCAGACATGGGCATTTATTACTGTGCGAGAGGCGTCGTGGGAGCAA |
| | | | GCGACTTCTATTATTACGGTATGGACGTCTGGGGCCAAGGGACCGCGGTCACCGTCTCCTCA |
| | 9241 | light | GACATCCAGATGACCCAGTCTCCATCCTCCCTGTCTGCATCTGTTGGGGACAGAGTCACCAT |
| | | | CACTTGCCGGGCAAGTGAAACCATTAGTAATTTTTTAAATTGGTATCTCCAACGACCAGGGA |
| | | | AAGCCCCTCAGGTCCTCATCTATTCTGCAGCCCGTTTACAAAGTGGGGTCCCATCAAGGTTC |
| | | | CGTGCCAGTGGATCTGGGACAGATTTCACTCTCACCATCACCAGTCTGCAACTTGAAGATTT |
| | | | TGGAGTTTATTACTGTCAACAGAGTTTCAATACCCCTCGGACGTTCGGCCAAGGGACCAGGG |
| | | | TGGAGATCAAA |
| COV2- | 9242 | heavy | GAGGTGCAGCTGGTGGAGTCTGGGGGAGGCTTGGTCCAGCCTGGGGGGTCCCTGACACTCTC |
| 136 | | | CTGTGCAGCCTCTGGTTTGACCATTAGAAACTATTGGATGAACTGGGTCCGCCAGGCTCCAG |
| | | | GGAAGGGGCTGGAGTGGGTGGCCAACATGGAAGAAGATGGAAGTGAGAAAAACTATGTGGAC |
| | | | TCTGTGAAGGGCCGATTCATCATCTCCAGAGACGACGCCAAGAACTCACTATATCTACAAAT |
| | | | GAACAGCCTGAGAGCCGAGGACACGGCTGTATATTACTGTACGAGAGATCCCGGTCCCGGGG |
| | | | ATTTTTCGTGGGGCCAGGGAACCGTGGTAACCGTCTCCTCAG |
| | 9243 | light | GAAATTGTGTTGACGCAGTCTCCAGGCACCCTGTCTTTGTCTCCAGGGGAAAGAGCCACCCT |
| | | | CTCCTGCAGGGCCAGTGAGAGTGTCAGTAGTAACTACTTAGCCTGGTACCAGCAGAAGCCTG |
| | | | GCCAGGCTCCCAGGCTCCTCATCTACGATGCATCCAGCAGGGCCACTGGCATCCCAGACAGG |
| | | | TTCAGTGGCAGTGGGTCTGGGACAGACTTCACTCTCACCATCAGCAAACTGGAGCCTGAAGA |
| | | | TTTTGCAGTATATTACTGTCAGCAGTATGCTCGGGCCCCGGACACCTTCGCCCAAGGGACAC |
| | | | GACTGGAGATTAAAC |
| COV2- | 9244 | heavy | CAGGTGCAGCTACAGCAGTGGGGCGCAGGACTCTTGAAGCCTGCGGAGACCCTGTCCCTCAC |
| 137 | | | CTGCGCTGTCCATGGTGGGTCCTTCACTGATTCCTACTGGAGTTGGATCCGCCAGACCCCCG |
| | | | GGCAGGGACTGGAGTGGCTTGGGGAAGTCAATCATAGTGGAAGCACCAACTACAGCCCGTCC |
| | | | CTCAAGACTCGAGTCGCCATATCAATAGACACGTCCAAGAACCAGGTCTCCCTCAGGCTGAC |
| | | | CTCTGTGAGCGCCGCGGACACGGCTGTCTATTATTGTGCGAGAGGAATGGCCGTTCGGGGGA |
| | | | GACAGCTCTACTTACTCGGGGGCTATGACCTCTGGGGCCAGGGAACCCTGGTCACCGTCTCC |
| | | | TCAG |
| | 9245 | light | GAAGTTGTGATGACGCAGTCTCCAGCCACCCTGTCTGTGTCTCCAGGGGAAAGAGCCACCCT |
| | | | CTCCTGCAGGGCCAGTCAGAGTGTCTACATCAACTTAGCCTGGTACCAGCAGAAACCTGGCC |
| | | | AGCCTCCCAGGCTCCTCATCTATGGTGCATCCACCAGGGCCACTGGTATCCCAGCCAGGTTC |
| | | | AGTGGCAGTGGGTCTGGGACAGAGTTCACTCTCACCATCAGCAGCCTGGAGTCTGAAGATTT |
| | | | TGGAACTTATTACTGTCAGCAGTATAATCACTGGCGGACGTTCGGCCAAGGGACCAAGGTGG |
| | | | AAATCAAAC |
| COV2- | 9246 | heavy | TCCCAGCTGCTGCAGGAGTCGGGCCCAGGACTCGTGAAGCCTTCGGAGACCCTGTCCCTCAC |
| 138 | | | GTGCACTGTATTTGGTGACTCCATCTATGGTTACTACTGGACTTGGATCCGGCAGCCCCCAG |
| | | | GGAGGGGACTGGAGTGGATTGGGTCTGTCTATCACAGTGGCAGCACCAACTACAACCCCTCC |
| | | | CTCATGAGTCGAGTCACCATATCAGTGGACACGTCCGAGAAGCAGTTCTCCCTGAAGGTGAC |
| | | | TTCTGTGACCGGTGCGGACACGGCCGTATATTTTTGTGCGAGAGGGCTGGCTGGCGGGGGTT |
| | | | ATTTTGACGCCTGGGGCCAGGGAAACCTGGTCGCCGTCTCCTCAG |
| | 9247 | light | GACGTCCAGATGACCCAGTCTCCATCCTCCCTGTCTGCATCTGTAGGAGACAGAGTCACCAT |
| | | | CACTTGCCGGGCGAGTCCGGGCATTAACACTTATTTAGCCTGGTATCAGCAGAAGCCAGGGC |
| | | | AAGTTCCTGACCTCCTGATCTATGGTGCATCCACCTTGCGATCTGGGGTCCCGTCTCGGTTC |
| | | | AGTGGCAGTGGATCTGGGACAGATTTCACTCTCACCATCAGCAGCCTGCAGCTTGAAGATGT |
| | | | TGCAACTTATTACTGTCAGGCTTATTACGTTGGCCTCGGTACTTTCGGCCAAGGGACCAAGG |
| | | | TGGAAATCAAAC |
| COV2- | 9248 | heavy | GAGGTGCAACTGGTGGAGTCTGGGGGAGGAGTGGTACGGCCTGGGGAGTCCCTGAGACTCTC |
| 139 | | | CTGTGTAGGCTCTGGATTCCCCTTTGGTGGCTATGGCATGAGTTGGGTCCGCCAAGTTCCAG |
| | | | GGAAGGGGCTGGAGTGGGTCTCTGGAATTAATTGGAGTGCTGATCGAAGAGTTTATGCAGAC |
| | | | TTTGTGAAGGGCCGATTCACCATCTCCAGAGACTACCCCAAGAAGTCTGTGTCCTTGCAAAT |
| | | | GGACAATCTCAGAGCCGAGGACACGGCCCTCTATTATTGTGCGAGAGAGCGGACCTCTCGCC |
| | | | GTGACTTTGACTTCTGGGGCCAGGGAACCCTGGTCACCGTCTCCTCAG |
| | 9249 | light | TCCTTTGTGCTGACTCAGCCACCCTCAGTGTCAGTGGCTCCAGGACAGACGGCCAGGATTCC |
| | | | CTGTGCGAAAAATTATCGTGGAAGTCAGACTGTGCACTGGTACCAGCGGAAGCCAGGCCAGG |
| | | | CCCCTGTCTTGGTCATCAATTCTGATGACGACCGGCCCTCAGGGATCTCTGAGCGATTCTCT |
| | | | GGCTCCAACTCTGGGAACACGGCCACCCTGACCATCAGCAGGGTCGAAGCCGGGGATGAGGC |
| | | | CGACTATTATTGTCAGGTGTGGGATCCCAGTTCTGATCAAGCGCTATTCGCCGGAGGGACCA |
| | | | CGCTGACCGTCCTA |
| COV2- | 9250 | heavy | GAGGTGCAGCTGGTGGACTCTGGGGGAGGCTTGGTCCAGCCTGGGGGGTCCCTGAGACTCTC |
| 140 | | | CTGTGCAGCCTCTGGATTCACCTTTACTAGTTATTGGATGAACTGGGTCCGCCAGGCTCCAG |
| | | | GGAAGGGGCTGGAGTGGGTGGCCAACATAAAGCAAGATGGAAGTGAGAAAGACTATGTGGAC |
| | | | TCTGTGAAGGGACGATTCACCATCTCCAGAGACAACGCCAAGAACTCACTGTATCTGCAAAT |
| | | | GAGCAGCCTGAGAGCCGAGGACACGGCTGTGTATTACTGTGCGAGAGATCTCGGCAGTGGCT |
| | | | CGTACCACCTCTTTGACTACTGGGGCCAGGGAACCCTGGTCACCGTCTCCTCAG |
| | 9251 | light | TCCTATGAGCTGACACAGCCACCCTCAGTGTCAGTGTCCCCAGGACAGACGGCCAGGATCAT |
| | | | CTGCTCTGGAGATGCATTGCCAAAGCAAAATGCTTATTGGTACCAGAAGAAGCCAGGCCAGG |
| | | | CCCCTGTGTTGGTGATATTTAAAGACAGTGAGAGGCCCTCAGGCATCCCTCAGCGATTCTCT |
| | | | GGCTCCAGCTCGGGGACAACAGTCACGTTGACCATCAGTGGAGTCCAGGCAGAAGACGAGGC |
| | | | TGACTATTACTGTCAATCAGCAGACAGCAGTGGTACTTATGTGGTATTCGGCGGAGGGACCA |
| | | | AGCTGACCGTCCTAG |
| COV2- | 9252 | heavy | CAGGTGCAGCTGGTACAATCTGGGTCTGAATTGAAGAAGCCTGGGGCCTCAGTGAAGGTTTC |
| 141 | | | CTGCAAGACTTCTGGATACACCTTCACTAGTTATGCTATAAATTGGGTGCGACAGGCCCCTG |
| | | | GACAAGGGCTTGAGTGGATCGGATGGATCAACATCAACACTGGGAACCCAACGTATGCCCAG |
| | | | GGCTTCACAGGACGGGTTGACTTCTCCTTGGACACCTCTGTCAGCACGGCATATCTGCAGAT |
| | | | CAGAAGCCTAAAGGCTGAGGACACTGCTGTGTATTACTGTGCGAGAGATCGGGGTATAGCAG |
| | | | CTCGTCGGGGATACTACTACTACGGTATGGACGTCTGGGGCCAAGGGACCACGGTCACCGTC |
| | | | TCCTCA |
| | 9253 | light | GACATCCAGATGACCCAGTCTCCATCCTCCCTGTCTGCATCTGTAGGAGACAGAGTCACCAT |
| | | | CACTTGCCGGGCAAGTCAGAGCATTACCACCTATTTAAATTGGTATCAGCAGAAAGCAGGGA |
| | | | AAGCCCCTAACCTCCTGATCTATGCTCCATCCAATTTGCAAAGTGGGGTCCCATCAAGATTC |
| | | | AGTGGCAGTGGATCTGGGACAGATTTCACTCTCACCATCAGCAGTCTGCAACCTGAAGATTT |
| | | | TGGAACTTACTACTGTCAGCAGAGTTACAGTAGTCCGTTCACTTTCGGCCCTGGGACCAAAG |
| | | | TGGATATCAAAC |
| COV2- | 6254 | heavy | GAGGTGCAACTGGTGGAGTCTGGGGGAGGAGTGGTACGGCCTGGGGAGTCCCTGAGACTCTC |
| 142 | | | CTGTGTAGGCTCTGGATTCCCCTTTGGTGGCTATGGCATGAGTTGGGTCCGCCAAGTTCCAG |
| | | | GGAAGGGGCTGGAGTGGGTCTCTGGAATTAATTGGAGTGCTGATCGAAGAGTTTATGCAGAC |
| | | | TTTGTGAAGGGCCGATTCACCATCTCCAGAGACTACCCCAAGAAGTCTGTGTCCTTGCAAAT |
| | | | GGACAATCTCAGAGCCGAGGACACGGCCCTCTATTATTGTGCGAGAGAGCGGACCTCTCGCC |
| | | | GTGACTTTGACTTCTGGGGCCAGGGAACCCTGGTCACCGTCTCCTCAG |
| | 9255 | light | TCCTATGAGCTGACACAGCCACCCTCAGTGTCAGTGTCCCCAGGACAGACGGCCAGGATCAT |
| | | | CTGCTCTGGAGATGCATTGCCAAAGCAAAATGCTTATTGGTACCAGAAGAAGCCAGGCCAGG |
| | | | CCCCTGTGTTGGTGATATTTAAAGACAGTGAGAGGCCCTCAGGCATCCCTCAGCGATTCTCT |
| | | | GGCTCCAGCTCGGGGACAACAGTCACGTTGACCATCAGTGGAGTCCAGGCAGAAGACGAGGC |
| | | | TGACTATTACTGTCAATCAGCAGACAGCAGTGGTACTTATGTGGTATTCGGCGGAGGGACCA |
| | | | AGCTGACCGTCCTAG |
| COV2- | 9256 | heavy | GAGGTGCAGCTGGTGGACTCTGGGGGAGGCTTGGTCCAGCCTGGGGGGTCCCTGAGACTCTC |
| 143 | | | CTGTGCAGCCTCTGGATTCACCTTTACTAGTTATTGGATGAACTGGGTCCGCCAGGCTCCAG |
| | | | GGAAGGGGCTGGAGTGGGTGGCCAACATAAAGCAAGATGGAAGTGAGAAAGACTATGTGGAC |
| | | | TCTGTGAAGGGACGATTCACCATCTCCAGAGACAACGCCAAGAACTCACTGTATCTGCAAAT |
| | | | GAGCAGCCTGAGAGCCGAGGACACGGCTGTGTATTACTGTGCGAGAGATCTCGGCAGTGGCT |
| | | | CGTACCACCTCTTTGACTACTGGGGCCAGGGAACCCTGGTCACCGTCTCCTCAG |
| | 9257 | light | CAGTCTGTGTTGACGCAGCCGCCCTCAGTGTCTGCGGCCCCAGGACAGAAGGTCACCATCTC |
| | | | CTGCTCTGGAAGCAGCTCCAACATTGGGAATAATTATGTATCCTGGTACCAGCAGCTCCCAG |
| | | | GAACAGCCCCCAAACTCCTCATTTATGACAATAATAAGCGACCCTCAGGGATTCCTGACCGA |
| | | | TTCTCTGGCTCCAAGTCTGGCACGTCAGCCACCCTGGGCATCACCGGACTCCAGACTGGGGA |
| | | | CGAGGCCGATTATTACTGCGGAACATGGGATAACAGCCTGAGTGCCTGGGTGTTCGGCGGAG |
| | | | GGACCAAGCTGACCGTCCTA |
| COV2- | 9258 | heavy | CAGGTGCAGCTGCAGGAGTCGGGCCCAGGACTGGTGAAGCCTTCGGAGACCCTGTCCCTCAC |
| 144 | | | CTGCACTGTCTCTGGTGGCTCCATCAGTAGTTACTACTGGAGCTGGATCCGGCAGCCCCCAG |
| | | | GGAAGGGACTGGAGTACATTGGCTATATCTATTACAGTGGGAGCACCAACTACAACCCCTCC |
| | | | CTCAAGAGTCGAGTCACCATATCAGTAGACACGTCCAAGAACCAGTTATCCCTGAAGCTGAG |
| | | | GTCTGTGACCGCTGCGGACACGGCCGTGTATTACTGTGCGAGGGGGTTTGACTATTGGGGCC |
| | | | AGGGAACCCTGGTCACCGTCTCCTCAG |
| | 9259 | light | GAAATTGTGTTGACACAGTCTCCAGCCACCCTGTCTTTGTCTCCAGGGGAAAGAGCCACCCT |
| | | | CTCCTGCAGGGCCAGTCAGAGTGTTAGCAGCTACTTAGCCTGGTACCAACAGAAACCTGGCC |
| | | | AGGCTCCCAGGCTCCTCATTTTTGATGCATCCAACAGGGCCACTGGCATCCCAGCCAGGTTC |
| | | | AGTGGCAGTGGGTCTGGGACAGACTTCACTCTCACCATCAGCAGCCTAGAGCCTGAAGATTT |
| | | | TGCAGTTTATTTCTGTCAGCAGCGTAGCAGCTGGCAGGGGATCACTTTCGGCGGAGGGACCA |
| | | | AGGTGGAGATCAAAC |
| COV2- | 9260 | heavy | CAGGTGCAGCTGGTGCAATCTGGGTCTGAGTTGAAGAAGCCTGGGGCCTCAGTTAAGATTTC |
| 145 | | | CTGCAAGACTTCTGGATACAATTTCACTAATCATCCTATAAATTGGGTGCGACAGGCCCCTG |
| | | | GACAAGGGCTTGAGTGGATGGGATGGATCAACACCAACACTGGGAACCCAACGTATGGCCAG |
| | | | GCCTTCACAGGACGATTTGTCTTCTCCTTTGACACCTCTGTCGGCACGGCATATCTGCACAT |
| | | | CAGCGGCCTGCAGCCTGGAGACACTGCCTTCTATTACTGTGTGAGAGAGGACCTGAGACTTA |
| | | | GACAGGTGTGGTGGCGGTGGTTCGACCCCTGGGGCCAGGGAACCCTGGTCACCGTCTCCTCA |
| | | | G |
| | 9261 | light | GAGATCCAGATGACCCAGTCACCATCCTCCCTGTCTGCCTCTGTAGGAGACAGAGTCACCAT |
| | | | TTCTTGTCGGGCAAGTCAGAGCGTCGGCGGTCATTTAAATTGGTATCAGCAGAAACCGGGGA |
| | | | AAGCCCCTAAGGTCCTGATCCACGCTGCTTCCAGTTTAGAAGGTGGGGTCCCTTCACGGTTC |
| | | | AGTGGCAGTGGATCTGGGACAGATTACACTCTCACCATCACCAACCTTCAGCCTGAAGATTT |
| | | | TGCGACTTACTTCTGCCAGCAGAGTCGCAACTCCCCTGCGACGTTCGGCCAAGGGACCAAGG |
| | | | TGGAGATGAAAC |
| COV2- | 9262 | heavy | CAGGTGCAGCTGGTGGAGTCTGGGGGAGGCGTGGTCCAGCCTGGGAGGTCCCTGAGACTCTC |
| 146 | | | CTGTGCAGCCTCTGGATTCACCTTCAGTAGCTATGCTATGCACTGGGTCCGCCAGGCTCCAG |
| | | | GCAAGGGGCTGGAGTGGGTGGCAGTTATATCATATGATGGAAGCAATAAATACTACGCAGAC |
| | | | TCCGTGAAGGGCCGATTCACCATCTCCAGAGACAATTCCAAGAACACGCTGTATCTGCAAAT |
| | | | GAACAGCCTGAGAGCTGAGGACACGGCTGTGTATTACTGTGCGAGAGGAAAACTGGGGATAG |
| | | | TCGGTGATGCTTTTGATATCTGGGGCCAAGGGACAATGGTCACCGTCTCTTCAG |
| | 9263 | light | GACATCCAGATGACCCAGTCTCCATCCTCCCTGTCTGCATCTGTAGGAGACAGAGTCACCAT |
| | | | CACTTGCCAGGCGAGTCAGGACATTAGCAACTATTTAAATTGGTATCAGCAGAAACCAGGGA |
| | | | AAGCCCCTAAGCTCCTGATCTACGATGCATCCAATTTGGAAACAGGGGTCCCATCAAGGTTC |
| | | | AGTGGAAGTGGATCTGGGACAGATTTTACTTTCACCATCAGCAGCCTGCAGCCTGAAGATAT |
| | | | TGCAACATATTACTGTCAACAGTATGATAATCTCCCTCTCACTTTCGGCCCTGGGACCAAAG |
| | | | TGGATATCAAAC |
| COV2- | 9264 | heavy | TCCCAGCTGCTGCAGGAGTCGGGCCCAGGACTCGTGAAGCCTTCGGAGACCCTGTCCCTCAC |
| 147 | | | GTGCACTGTATTTGGTGACTCCATCTATGGTTACTACTGGACTTGGATCCGGCAGCCCCCAG |
| | | | GGAGGGGACTGGAGTGGATTGGGTCTGTCTATCACAGTGGCAGCACCAACTACAACCCCTCC |
| | | | CTCATGAGTCGAGTCACCATATCAGTGGACACGTCCGAGAAGCAGTTCTCCCTGAAGGTGAC |
| | | | TTCTGTGACCGGTGCGGACACGGCCGTATATTTTTGTGCGAGAGGGCTGGCTGGCGGGGGTT |
| | | | ATTTTGACGCCTGGGGCCAGGGAAACCTGGTCGCCGTCTCCTCAG |
| | 9265 | light | TCCTATGAGCTGACACAGCCACCCTCAGTGTCAGTGTCCCCAGGACAGACGGCCAGGATCAT |
| | | | CTGCTCTGGAGATGCATTGCCAAAGCAAAATGCTTATTGGTACCAGAAGAAGCCAGGCCAGG |
| | | | CCCCTGTGTTGGTGATATTTAAAGACAGTGAGAGGCCCTCAGGCATCCCTCAGCGATTCTCT |
| | | | GGCTCCAGCTCGGGGACAACAGTCACGTTGACCATCAGTGGAGTCCAGGCAGAAGACGAGGC |
| | | | TGACTATTACTGTCAATCAGCAGACAGCAGTGGTACTTATGTGGTATTCGGCGGAGGGACCA |
| | | | AGCTGACCGTCCTAG |
| COV2- | 9266 | heavy | CAGGTGCAGCTGGAGCAGTCTGGGGCTGAGGTGAAGAGGCCTGGGTCTTCGGTGAAGGTCTC |
| 148 | | | CTGCAAGGGTGATGGGGACACATTCAGCACATATGCCATCACCTGGGTGCGACAGGCCCCTG |
| | | | GACAAGGGCTTGAGTGGATGGGGAGGATCATCCCTGGCCTTGACCTGGTGGATAATCAACAG |
| | | | AAGTTTCAGGACAGACTGACAATTACCGCGGACAAATCCACGACCACAGCCTACATGGAGCT |
| | | | GAGAAGCCTCAGATCTGAAGACACGGCCGTATATTATTGTGCGAGAGGTAGACGTTACGATT |
| | | | TTTTGGATGGTCAATATACGTCATGGTACTTCGACATTTGGGGCCGTGGCACCCTGGTCACT |
| | | | GTCTCCTCAG |
| | 9267 | light | GAAATAGTGTTGACGCAGTCTCCAGCCACCCTGTCTGTGTCTCCAGGGGAAAGGGTCACCCT |
| | | | CTCCTGCAGGGCCAGTCAGACTGTAAACAACAACTTAAACTGGCTCCAGCACAAACCGGGCC |
| | | | AGGCTCCCAGGCTCGTCATCATTGGTACATCTACCAGGGCCTCTGGTGTCCCAGCCAGGTTC |
| | | | AGTGGCAGTGGGTCGGGGACAGAGTTCACTCTCACCATCAGCAGCCTGCAGTCTGAGGATTA |
| | | | TGCAATTTATTACTGTCAACAGTATTATGAGTGGCCTCCGATCACCTACGGCCAAGGGACAC |
| | | | GACTGGAGATTA |
| COV2- | 9268 | heavy | GAGGTCCAGCTGGTACAGTCTGGGGCTGAGGTGAAGAAGCCTGGGGCTACAGTGAAAATCTC |
| 149 | | | CTGCAAGGTTTCTGGATACACCTTCACCGACTACTACATGCACTGGGTGCAACAGGCCCCTG |
| | | | GAAAAGGGCTTGAGTGGATGGGACTTGTTGATCCTGAAGATGGTGAAACAATATACGCAGAG |
| | | | AAGTTCCAGGGCAGAGTCACCATAACCGCGGACACGTCTACAGACACAGCCTACATGGAGCT |
| | | | GAGCAGCCTGAGATCTGAGGACACGGCCGTGTATTACTGTGCAACAGTGTCCAGGTGGTACT |
| | | | ACTACTACTACGGTATGGACGTCTGGGGCCAAGGGACCACGGTCACCGTCTCCTCA |
| | 9269 | light | GAAATTGTGTTGACGCAGTCTCCAGGCACCCTGTCTTTGTCTCCAGGGGAAAGAGCCACCCT |
| | | | CTCCTGCAGGGCCAGTCAGAGTGTTAGCAGCAGCTACTTAGCCTGGTACCAGCAGAAACCTG |
| | | | GCCAGGCTCCCAGGCTCCTCATCTATGGTGCATCCAGCAGGGCCACTGGCATCCCAGACAGG |
| | | | TTCAGTGGCAGTGGGTCTGGGACAGACTTCACTCTCACCATCAGCAGACTGGAGCCTGAAGA |
| | | | TTTTGCAGTGTATTACTGTCAGCAGTATGGTAGCTCTTACACTTTTGGCCAGGGGACCAAGC |
| | | | TGGAGATCAAAC |
| COV2- | 9270 | heavy | CAGGTGCAGCTGGTGGAGTCTGGGGGAGGCGTGGTCCAGCCTGGGAGGTCCCTGAGACTCTC |
| 150 | | | GTGTGCAGCCTCTGGTTTTAACCTCAGCAACTATGCTATGCACTGGGTCCGCCAGGCATCAG |
| | | | GCAAGGGGCTGGAGTGGGTGTCACTTATATCATACGATGGAAGTATTAAATATTACACAGAC |
| | | | TCCGTGAAGGGCCGATTCACCGTCTCCGGGGACAATTCCAAGAACACACTGTTTCTGCAAAT |
| | | | GAACAGCCTGCGACCTGACGACTCGGCTCTTTATTACTGTGTGAGGGGCGGTGTCAGTGGCC |
| | | | CAAATTCTTTTGATATGTGGGGCCAAGGGACAACGGTCACCGTCTCTTC |
| | 9271 | light | GATGTTGTGATGACTCAGTCTCCACTCTCCCTGCCCGTCACCCTTGGACAGCCGGCCTCCAT |
| | | | CTCCTGCAGGTCTAGTCAAAGCCTCGTATACAGTGATGGAAACACCTACGTGAATTGGTTTC |
| | | | AGCAGAGGCCAGGCCAATCTCCAAGGCGCCTAATCTATCAGGTTTCTATCCGGGCCTCTGGG |
| | | | GTCCCAGACAGATTCAGCGGCAGTGGGTCAGGCACTGATTTCGCACTGAAAATCAGCAGGGT |
| | | | GGAGGCTGAGGATGTTGGGATTTATTATTGCATGCAAGGTACACACTGGCCGGTGACGTTCG |
| | | | GCCAAGGGACCAAGGTGGAAATCAAAC |
| COV2- | 9272 | heavy | GAGGTGCAGTTGTTGGAGTCGGGGGGAGGCTTGGTGCAGCCTGGGGGGTCCCTGAGACTCTC |
| 151 | | | CTGTGCAGCCTCTGGATTCGTCTTTAGCGACTATTCCATGAATTGGGTCCGCCTGGCTCCAG |
| | | | GAAAGGGGCTGGCGTGGGTCTCTGTTGTTGGTGTTGATGCCGTCACCAAATTCTATGAAGAC |
| | | | TCCGTGAAGGGCCGGTTCACCATTTCCAGAGACAACTCCAAGAACACGATATATCTGCAAAT |
| | | | GAACAACCTGAGAGCCGAAGACACGGCCGTATATCACTGTGCGAAAAGTCAGCCGGTGTCTC |
| | | | GCATGGGTCGCTTCTTCGTCGGTTTGGACGTCTGGGGCCAAGGGACCACGGTCACCGTCTCC |
| | | | TCA |
| | 9273 | light | CAGTCTGCCCTGACTCAGCCTCCCTCCGCGTCCGGGTCTCCTGGACAGTCAGTCACCATCTC |
| | | | CTGCACTGGAAGCAGCAATGACGTCGGTCGTTATAACTATGTCTCATGGTACCAACATCACC |
| | | | CAGGCAAAGCCCCCAGACTCATGATTTCTGAGGTCGTTAAGCGGCCCTCAGGGGTCCCTGAT |
| | | | CGCTTCTCTGGCTCCAAGTCTGGCAACACGGCCTCCCTGACCGTCTCTGGACTCCAGGCTGA |
| | | | AGATGAGGCTGATTATTACTGCAGCTCATATGGAGGCAACAACATTTTACTATTCGGCGGAG |
| | | | GGACCAAGCTGACCGTCCTAG |
| COV2- | 9274 | heavy | CAGGTGCAACTGGTGGAGTCTGGGGGAGGCGTGGTCCAGCCTGGGAGGTCCCTGAGACTCTC |
| 152 | | | CTGTGCAGCCTCTGGATTCACCTTCATTAGCTATACTATGCACTGGGTCCGCCAGGCTCCAG |
| | | | GCAAGGGGCTGGAGTGGGTGGCACTTATATCATATGATGGATACAATAAGTACTATGCAGAC |
| | | | TCCGTGAAGGGCCGATTTACCATCTCCAGAGACAATTCCAAGAACACGCTGTATGTGCAAAT |
| | | | GAACAGCCTGAGAGCTGAGGACACGGCTCTGTATTACTGTGCGAGAGAAGGGAGCCCGGAGG |
| | | | CCTTTGACTACTGGGGCCAGGGAACCCTGGTCACCGTCTCCTCAG |
| | 9275 | light | TCCTATGAGCTGACACAGCCACCCTCAGTGTCAGTGTCCCCAGGACAGACGGCCAGGATCAT |
| | | | CTGCTCTGGAGATGCATTGCCAAAGCAAAATGCTTATTGGTACCAGAAGAAGCCAGGCCAGG |
| | | | CCCCTGTGTTGGTGATATTTAAAGACAGTGAGAGGCCCTCAGGCATCCCTCAGCGATTCTCT |
| | | | GGCTCCAGCTCGGGGACAACAGTCACGTTGACCATCAGTGGAGTCCAGGCAGAAGACGAGGC |
| | | | TGACTATTACTGTCAATCAGCAGACAGCAGTGGTACTTATGTGGTATTCGGCGGAGGGACCA |
| | | | AGCTGACCGTCCTAG |
| COV2- | 9276 | heavy | GAGATGCAGCTGGTGGAGTCCGGGGGAGGCTTAGTTCAGCCGGGGGGGTCCCTGAGACTCTC |
| 153 | | | CTGTGCAGCCTCTGGATTCACCTTCAGTGACTACTACATGTACTGGGTCCGCCAAGCTCCAG |
| | | | GGAAGGGGCTGGTGTGGGTCTCACGTATTAAGCCTGATGGGACTGGCACAAGTTACGCGGAC |
| | | | TCCGTGAGGGGCCGATTCACCGTCTCCAGAGACAACGCCAAGAACACGCTGAATCTGCAAAT |
| | | | GAACAGTCTGAGAGCCGAGGACACGGCTGTGTATTATTGTGTGGCCTACAACTGGAACTACG |
| | | | ACTTCTGCTGGGGCCAGGGAACCCTGGTAACCGTCTCCGCAG |
| | 9277 | light | GATGTTACTGTGACTCAGTCTCCACTCTCCCTGCCCGTCACCCTTGGACAGCCGGCCTCCAT |
| | | | CTCCTGCAGGTCTAGTCAAAGCCTCGTATACAGTGATGGAAACACCTACTTGAATTGGTTTC |
| | | | AGCAGAGGCCAGGCCAATCTCCAAGGCGCCTAATTTATCAGGTTTCTAACCGGGACTCTGGG |
| | | | GTCCCAGACAGATTCAGCGGCAGTGGGTCAGGCACTGATTTCACACTGACAATTAGCAGGGT |
| | | | GGAGGCTGAAGATGTTGGGGTTTATTACTGCATGCAAGGTTCATACTGGCCATTCACTTTCG |
| | | | GCCCTGGGACCAAAGTGGATATCAAAC |
| COV2- | 9278 | heavy | GAGGTGCAATTGGTGGAGTCTGGGGGAGGCTTGGTCCAGCCGGGGGGGTCCCTGAGGCTCTC |
| 154 | | | CTGTTCAGCCTCTGGATTCAGTTACAGTAATTATTGGATGACTTGGGTCCGACAGGCTCCAG |
| | | | GGAAGGGGCTGGAGTGGGTGGCCAACCTAAGACGAGATGGAAGTGTGGAGCACTATGTGGAC |
| | | | TCTGTGAGGGGCCGATTCACCATCTCCAGAGACAACGCCAAGAACTCCCTGTATCTACAAAT |
| | | | GGACAGCCTGAGAGCCGAGGACACGGCTGTGTATTACTGTGCGAGAGATTTAAGTCCCGGCG |
| | | | GTTTGGGGGCCTATTACGATGTTTTTGATATCTGGGGCCAAGGGACAATGGTCACCGTCTCT |
| | | | TCAG |
| | 9279 | light | GCCATCCAGATGACCCAGTCTCCATCCTCCCTGTCTGCATCTTTGGGAGACAGAATCTCCAT |
| | | | CACTTGCCGGGCAAGTCAGGGCATTGGAAATGAGTTGGGCTGGTATCAGCAGAAACCAGGTA |
| | | | AAGCCCCTAGACTCCTCATCTATGCTGGTTCCACTTTACAAGGTGGAGTCCCACCAAGGTTC |
| | | | AGCGGCTCTGGATCTGGCACAGATTTCACTCTCACCATAAGCAGCCTGCAGGCTGAAGATTT |
| | | | TGCAACATATTATTGTCTGCAAGATTACGCCTACCCTCGGACGTTCGGCCCAGGGACCAAGG |
| | | | TGGAAGTCAAAC |
| COV2- | 9280 | heavy | GAGGTGCAGTTGTTGGAGTCGGGGGGAGGCTTGGTGCAGCCTGGGGGGTCCCTGAGACTCTC |
| 155 | | | CTGTGCAGCCTCTGGATTCGTCTTTAGCGACTATTCCATGAATTGGGTCCGCCTGGCTCCAG |
| | | | GAAAGGGGCTGGCGTGGGTCTCTGTTGTTGGTGTTGATGCCGTCACCAAATTCTATGAAGAC |
| | | | TCCGTGAAGGGCCGGTTCACCATTTCCAGAGACAACTCCAAGAACACGATATATCTGCAAAT |
| | | | GAACAACCTGAGAGCCGAAGACACGGCCGTATATCACTGTGCGAAAAGTCAGCCGGTGTCTC |
| | | | GCATGGGTCGCTTCTTCGTCGGTTTGGACGTCTGGGGCCAAGGGACCACGGTCACCGTCTCC |
| | | | TCA |
| | 9281 | light | GAAATTGTGTTGACGCAGTCTCCAGGCACCCTGTCTTTGTCTCCAGGGGAAAGAGCCACCCT |
| | | | CTCCTGCAGGGCCAGTCAGAGTGTTAGCAGCAGCTACTTAGCCTGGTACCAGCAGAAACCTG |
| | | | GCCAGGCTCCCAGGCTCCTCATCTATGGTGCATCCAGCAGGGCCACTGGCATCCCAGACAGG |
| | | | TTCAGTGGCAGTGGGTCTGGGACAGACTTCACTCTCACCATCAGCAGACTGGAGCCTGAAGA |
| | | | TTTTGCAGTGTATTACTGTCAGCAGTATGGTAGCTCTTACACTTTTGGCCAGGGGACCAAGC |
| | | | TGGAGATCAAAC |
| COV2- | 9282 | heavy | GAGGTGCAGCTGTTGGAGTCTGGGGGAGGCTTGGTACAGCCTGGGGGGTCCCTGAGACTCTC |
| 156 | | | CTGTGCAGCCTCTGGATTCACCTTTAGCAGCTATGCCATGAGCTGGGTCCGCCAGGCTCCAG |
| | | | GGAAGGGGCTGGAGTGGGTCTCAGCTATTAGTGGTAGTGGTGGTAGCACATACTACGCAGAC |
| | | | TCCGTGAAGGGCCGGTTCACCATCTCCAGAGACAATTCCAAGAACACGCTGTATCTGCAAAT |
| | | | GAACAGCCTGAGAGCCGAGGACACGGCCGTATATTACTGTGCGAAAGATCAACACATGGTTC |
| | | | GGGGAGCTATAGGCTTTGACTACTGGGGCCAGGGAACCCTGGTCACCGTCTCCTCAG |
| | 9283 | light | GAAATAGTGATGACGCAGTCTCCAGCCACCCTGTCTGTGTCTCCAGGGGAAAGAGCCACCCT |
| | | | CTCCTGCAGGGCCAGTCAGAGTGTTAGCAGCAACTTAGCCTGGTACCAGCAGAAACCTGGCC |
| | | | AGGCTCCCAGGCTCCTCATCTATGGTGCATCCACCAGGGCCACTGGTATCCCAGCCAGGTTC |
| | | | AGTGGCAGTGGGTCTGGGACAGAGTTCACTCTCACCATCAGCAGCCTGCAGTCTGAAGATTT |
| | | | TGCAGTTTATTACTGTCAGCAGTATAATAACTGGCGGACGTTCGGCCAAGGGACCAAGGTGG |
| | | | AAATCAAAC |
| COV2- | 9284 | heavy | GAGGTGCAGTTGGTGGAGTCTGGGGGAGGCTTGGTCCAGCCTGGGGGGTCCCTGAGACTCTC |
| 157 | | | CTGTGCAGCCTCTGGATTCATCTTTAGTAACTTTTGGATGAACTGGGTCCGCCAGGCTCCAG |
| | | | GGAAGGGGCTGGAGTGGGTGGCCAACATACAGCAAGATGGAAGTGAGAAATACTATGTGGAC |
| | | | TCTGTGAAGGGCCGATTCACCATCTCCACAGACCTCGCCAAGAACTCACTGTATCTGCAAAT |
| | | | GAACAGCCTGAGAGCCGAAGACACGGCTGTGTATTACTGTGCGAGACAACACGGTGACTACG |
| | | | ACTGGTACTTTGACTACTGGGGCCAGGGAACCCTGGTCACCGTCTCCTCAG |
| | 9285 | light | GACATCCAGATGACCCAGTCTCCATCTTCTGTGTCTGCATCTGTAGGAGACAGAGTCACCAT |
| | | | CACTTGTCGGGCGAGTCAGGGTATTAACAGCTGGTTAGCCTGGTATCAGCAGAAACCAGGGA |
| | | | AAGCCCCTAAGCTCCTGATCTATGCTGCATCCAGTTTGCAAAGTGGGGTCCCATCAAGGTTC |
| | | | AGCGGCAGTGGATCTGGGACAGATTTCACTCTCACTATCAGCAGCCTGCAGCCTGAAGATTT |
| | | | TGCAACTTACTATTGTCAACAGGCTCACAGTTTCCCAATCACCTTCGGCCAAGGGACACGAC |
| | | | TGGAGATTAAAC |
| COV2- | 9286 | heavy | GAGGTGCAGTTGTTGGAGTCGGGGGGAGGCTTGGTGCAGCCTGGGGGGTCCCTGAGACTCTC |
| 158 | | | CTGTGCAGCCTCTGGATTCGTCTTTAGCGACTATTCCATGAATTGGGTCCGCCTGGCTCCAG |
| | | | GAAAGGGGCTGGCGTGGGTCTCTGTTGTTGGTGTTGATGCCGTCACCAAATTCTATGAAGAC |
| | | | TCCGTGAAGGGCCGGTTCACCATTTCCAGAGACAACTCCAAGAACACGATATATCTGCAAAT |
| | | | GAACAACCTGAGAGCCGAAGACACGGCCGTATATCACTGTGCGAAAAGTCAGCCGGTGTCTC |
| | | | GCATGGGTCGCTTCTTCGTCGGTTTGGACGTCTGGGGCCAAGGGACCACGGTCACCGTCTCC |
| | | | TCA |
| | 9287 | light | TCCTATGAGCTGACACAGCCACCCTCAGTGTCAGTGTCCCCAGGACAGACGGCCAGGATCAT |
| | | | CTGCTCTGGAGATGCATTGCCAAAGCAAAATGCTTATTGGTACCAGAAGAAGCCAGGCCAGG |
| | | | CCCCTGTGTTGGTGATATTTAAAGACAGTGAGAGGCCCTCAGGCATCCCTCAGCGATTCTCT |
| | | | GGCTCCAGCTCGGGGACAACAGTCACGTTGACCATCAGTGGAGTCCAGGCAGAAGACGAGGC |
| | | | TGACTATTACTGTCAATCAGCAGACAGCAGTGGTACTTATGTGGTATTCGGCGGAGGGACCA |
| | | | AGCTGACCGTCCTAG |
| COV2- | 9288 | heavy | CAGGTGCAACTGGTACAATCCGGGGGAGGCGTGGTCCAGCCTGGGAGGTCCCTGAGACTCTC |
| 159 | | | CTGTACAGCCTCTGGATTCACCTTCAGTAATTATGCTATGCACTGGGTCCGCCAGGCCCCAG |
| | | | GCAAGGGGCTGGAGTGGGGGGCAGTTATATCATATGACGGAACTATTACACTCTATGAAGAC |
| | | | TCCATGAGGGGCCGCTTCACCATCTCCAGAGACAATTCCAGGGACACCCTGTATCTGCAAAT |
| | | | GAATAGTCTGCGACCTGATGACACGGCTGTATATTACTGTGGGAGAGACCTCTCTGGGGGGG |
| | | | GTTTGGACGTCTGGGGCCAAGGGACCACGGTCACCGTCTCCTCA |
| | 9289 | light | CAGTCTGCCCTGACTCAGGCTCGCTCAGTGTCCGGGTCTCCTGGACAGTCAGTCACCGTCTC |
| | | | CTGCACTGGAAGCAGCAATGATGTTGGTGGTCATAACTATGTCTCCTGGTACCAGCATAGCC |
| | | | CAGGCAAAGCCCCCAAACTCATTATTTATGATGTCACTAAACGGCCCTCTGGGGTCCCTGAT |
| | | | CGCTTCTCCGGCTCCAAGTCTGGCGACACGGCCTCCCTGACCATCTCTGGGCTCCAGGCTGA |
| | | | CGATGAAGGTGATTATTACTGCTGCTCATATAAGAGTACTTACGACTATGTCTTCGGAAGTG |
| | | | GGACCACGGTCTCCGTCCT |
| COV2- | 9290 | heavy | CAGGTGCAGCTGGTGGAGTCTGGGGGAGGCGTGGTCCAGCCTGGGAGGTCCCTGAGACTCTC |
| 160 | | | CTGTGCAGCCTCTGGATTCACCTTCAGTATCTATGCTATCCACTGGGTCCGCCAGGCTCCAG |
| | | | GCAAGGGGCTGGAGTGGATGGCAGTTATATCATATGATGGAAATAATCAATACTACGCAGAC |
| | | | TCCGTGAAGGGCCGATTCACCATCTCCAGAGACAATTCCAAGAACACGCTGTATCTGCAAAT |
| | | | GAACAGCCTGAGAACTGACGACACGGCTGTCTATTACTGTGCGAGGAGCGAGGGAGGGGGTT |
| | | | ACCATGATGCTTTTGATATCTGGGGCCAAGGGACAATGGTCACCGTCTCTTCAG |
| | 9291 | light | CAGCTTGTGCTGACTCAATCGCCCTCTGCCTCTGCCTCCCTGGGAGCCTCGGTCAAACTCAC |
| | | | CTGCACTCTGAGCAGTGGGCACAGCAGCTACGCCATCGCGTGGCATCAGCAGCAGCCAGAGA |
| | | | AGGGCCCTCGGTACTTGATGAAGCTTAACAGTGATGGCAGCCACAACAAGGGGGACGGGATC |
| | | | CCTGATCGCTTCTCAGGCTCCAGCTCTGGGGCTGAGCGCTACCTCACCATCTCCAGCCTCCA |
| | | | GTCTGAGGATGAGGCTGACTATTTCTGTCAGACCTGGGGCACTGGCATTCACGTGTTCGGCG |
| | | | GAGGGACCAAGCTGACCGTCCTAG |
| COV2- | 9292 | heavy | CAGGTGCAACTGGTGGAGTCTGGGGGAGGCGTGGTCCAGCCTGGGAGGTCCCTGAGACTCTC |
| 161 | | | CTGTGCAGCCTCTGGATTCACCTTCATTAGCTATACTATGCACTGGGTCCGCCAGGCTCCAG |
| | | | GCAAGGGGCTGGAGTGGGTGGCACTTATATCATATGATGGATACAATAAGTACTATGCAGAC |
| | | | TCCGTGAAGGGCCGATTTACCATCTCCAGAGACAATTCCAAGAACACGCTGTATGTGCAAAT |
| | | | GAACAGCCTGAGAGCTGAGGACACGGCTCTGTATTACTGTGCGAGAGAAGGGAGCCCGGAGG |
| | | | CCTTTGACTACTGGGGCCAGGGAACCCTGGTCACCGTCTCCTCAG |
| | 9293 | light | TCCTTTGAGCTGACACAGCCACCCTCGCTGTCAGTGTCCCCAGGACAGACGGCCAGGATCAC |
| | | | CTGCTCTGGAGATGCATTGTCAAAGCAATTTACTTATTGGTACCAGCAGAAGCCAGGCCAGG |
| | | | CCCCTGTGTTGGTGATTTATAAAGACAGTGAGCGGCCCTCAGGGATCCCTGAGCGATTCTCT |
| | | | GGCTCCAGCTCAGGGACAACAGTCACGTTGACCATCAGTGGAGTCCAGGCAGAAGACGAGGC |
| | | | TGACTATTACTGTCAATCAGCACACAGCAGTGGTTTTTATCGTGTGGTATTCGGCGGAGGGA |
| | | | CCAAGCTGACCGTCCTAG |
| COV2- | 9294 | heavy | GAGGTGCAGCTGTTGGAGTCTGGGGGAGGCTTGGTACAGCCTGGGGGGTCCCTGAGACTCTC |
| 162 | | | CTGTGCAGCCTCTGGATTCACCTTTAGCAGCTATGCCGTGTACTGGGTCCGCCAGGCTCCAG |
| | | | GGAAGGGGCTGGAGTGCGTCTCATTTATTAGTGGTGGTGGTGAAACCACAGACTACGCAGAC |
| | | | TCCGTGAAGGGCCGGTTCACCATCTCCAGAGACAATTCCAAGAACACGTTGTATCTGCAAAT |
| | | | GAACGGCCTGAGAGCCGAGGACACGGCCGTATATTACTGTGCGAAATCCCCGGACGCAACAT |
| | | | TTCTGTGGTTCGGGGAGCCCTTCGGCTACTGGGGCCAGGGAACCCTGGTCACCGTCTCCTCA |
| | | | G |
| | 9295 | light | GAAATAGTGTTGACGCAGTCTCCAGCCACCCTGTCTGTGTCTCCAGGGGAAAGGGTCACCCT |
| | | | CTCCTGCAGGGCCAGTCAGACTGTAAACAACAACTTAAACTGGCTCCAGCACAAACCGGGCC |
| | | | AGGCTCCCAGGCTCGTCATCATTGGTACATCTACCAGGGCCTCTGGTGTCCCAGCCAGGTTC |
| | | | AGTGGCAGTGGGTCGGGGACAGAGTTCACTCTCACCATCAGCAGCCTGCAGTCTGAGGATTA |
| | | | TGCAATTTATTACTGTCAACAGTATTATGAGTGGCCTCCGATCACCTACGGCCAAGGGACAC |
| | | | GACTGGAGATTA |
| COV2- | 9296 | heavy | CAGGTGCAGCTGGAGCAGTCTGGGGCTGAGGTGAAGAGGCCTGGGTCTTCGGTGAAGGTCTC |
| 163 | | | CTGCAAGGGTGATGGGGACACATTCAGCACATATGCCATCACCTGGGTGCGACAGGCCCCTG |
| | | | GACAAGGGCTTGAGTGGATGGGGAGGATCATCCCTGGCCTTGACCTGGTGGATAATCAACAG |
| | | | AAGTTTCAGGACAGACTGACAATTACCGCGGACAAATCCACGACCACAGCCTACATGGAGCT |
| | | | GAGAAGCCTCAGATCTGAAGACACGGCCGTATATTATTGTGCGAGAGGTAGACGTTACGATT |
| | | | TTTTGGATGGTCAATATACGTCATGGTACTTCGACATTTGGGGCCGTGGCACCCTGGTCACT |
| | | | GTCTCCTCAG |
| | 9297 | light | GAGATCGTGATGACCCAGTCTCCAGACTCCCTGACTGTGTCTCTGGGCGAGAGGGCCACCAT |
| | | | CAGCTGCAAGTCCAGCCAGAGTCTTTTATACAGTTCCAACAATAGGGACTACTTAGCTTGGT |
| | | | ACCAACAGAAAGCAGGTCAGCCTCCTAAGTTGCTCTTTTACTGGGCATCTACCCGGGAATCC |
| | | | GGGGTCCCTGACCGATTCGGTGGCAGCGGGTCTGGGACACATTTCACTCTCACCATCTACAA |
| | | | CCTGCAGCCTGAAGATGTGGCAGTTTATTTCTGTCAGCAGTATTTTAGTCCTCCGTATACTT |
| | | | TTGGCCAGGGGACCAAGCTGGAGATCAAAC |
| COV2- | 9298 | heavy | GAGGTGCAGTTGGTGGAGTCTGGGGGAGGCTTGGTCCAGCCTGGGGGGTCCCTGAGACTCTC |
| 164 | | | CTGTGCAGCCTCTGGATTCATCTTTAGTAACTTTTGGATGAACTGGGTCCGCCAGGCTCCAG |
| | | | GGAAGGGGCTGGAGTGGGTGGCCAACATACAGCAAGATGGAAGTGAGAAATACTATGTGGAC |
| | | | TCTGTGAAGGGCCGATTCACCATCTCCACAGACCTCGCCAAGAACTCACTGTATCTGCAAAT |
| | | | GAACAGCCTGAGAGCCGAAGACACGGCTGTGTATTACTGTGCGAGACAACACGGTGACTACG |
| | | | ACTGGTACTTTGACTACTGGGGCCAGGGAACCCTGGTCACCGTCTCCTCAG |
| | 9299 | light | GAAATTGTGTTGACGCAGTCTCCAGGCACCCTGTCTTTGTCTCCAGGGGAAAGAGCCACCCT |
| | | | CTCCTGCAGGGCCAGTCAGAGTGTTAGCAGCAGCTACTTAGCCTGGTACCAGCAGAAACCTG |
| | | | GCCAGGCTCCCAGGCTCCTCATCTATGGTGCATCCAGCAGGGCCACTGGCATCCCAGACAGG |
| | | | TTCAGTGGCAGTGGGTCTGGGACAGACTTCACTCTCACCATCAGCAGACTGGAGCCTGAAGA |
| | | | TTTTGCAGTGTATTACTGTCAGCAGTATGGTAGCTCTTACACTTTTGGCCAGGGGACCAAGC |
| | | | TGGAGATCAAAC |
| COV2- | 9300 | heavy | GAGGTGCAGCTGGTGGAGTCTGGGGGAGGCTTGGTCCAGCCTGGGGGGTCCCTGACACTCTC |
| 165 | | | CTGTGCAGCCTCTGGTTTGACCATTAGAAACTATTGGATGAACTGGGTCCGCCAGGCTCCAG |
| | | | GGAAGGGGCTGGAGTGGGTGGCCAACATGGAAGAAGATGGAAGTGAGAAAAACTATGTGGAC |
| | | | TCTGTGAAGGGCCGATTCATCATCTCCAGAGACGACGCCAAGAACTCACTATATCTACAAAT |
| | | | GAACAGCCTGAGAGCCGAGGACACGGCTGTATATTACTGTACGAGAGATCCCGGTCCCGGGG |
| | | | ATTTTTCGTGGGGCCAGGGAACCGTGGTAACCGTCTCCTCAG |
| | 9301 | light | TCCTATGAGCTGACACAGCCACCCTCAGTGTCAGTGTCCCCAGGACAGACGGCCAGGATCAT |
| | | | CTGCTCTGGAGATGCATTGCCAAAGCAAAATGCTTATTGGTACCAGAAGAAGCCAGGCCAGG |
| | | | CCCCTGTGTTGGTGATATTTAAAGACAGTGAGAGGCCCTCAGGCATCCCTCAGCGATTCTCT |
| | | | GGCTCCAGCTCGGGGACAACAGTCACGTTGACCATCAGTGGAGTCCAGGCAGAAGACGAGGC |
| | | | TGACTATTACTGTCAATCAGCAGACAGCAGTGGTACTTATGTGGTATTCGGCGGAGGGACCA |
| | | | AGCTGACCGTCCTAG |

TABLE 2
PROTEIN SEQUENCES FOR ANTIBODY VARIABLE REGION

| | Seq | | |
|---|---|---|---|
| Clone | ID | Chain | Variable Sequence Region |
| COV2- | 9302 | heavy | QVQLVQSGSELQKPGASVKVSCKASGNTFPTYDMNWVRQAPGQGLEWMGWINTNTGSPTYAQ |
| 166 | | | GLPGRFVFSLDTSVSTAYLEISSLKAEDTAVYYCAREGYHYGMDVWGQGTTVTVSS |
| | 9303 | light | DIQMTQSPSSLSASVGDRVTITCRASQDINNYLAWFQQKPGKAPKSLIYSASSLQSGVPSRF |
| | | | SGSGSGTDFTLTISSLQPEDFATYYCQQYRSYPRTFGQGTKLEIK |
| COV2- | 9304 | heavy | QAHLVQSGAEVKKPGSSVKVSCKASGGTFNSHAIGWVRQAPGQGLEWMGRIVPIRKTTTYAP |
| 167 | | | QLQGRLTLTADTSTSTLYMELSSLRSEDSARYYCARVILSGRGFDIWGQGSLVAVSS |
| | 9305 | light | SYELTQPPSVSVSPGQTARIICSGDALPKQNAYWYQKKPGQAPVLVIFKDSERPSGIPQRFS |
| | | | GSSSGTTVTLTISGVQAEDEADYYCQSADSSGTYVVFGGGTKLTVL |
| COV2- | 9306 | heavy | EVQLVESGGGLVQPGGSLRLSCAASGFIFSNFWMNWVRQAPGKGLEWVANIQQDGSEKYYVD |
| 168 | | | SVKGRFTISTDLAKNSLYLQMNSLRAEDTAVYYCARQHGDYDWYFDYWGQGTLVTVSS |
| | 9307 | light | SYELTQPPSVSVSPGQTARIICSGDALPKQNAYWYQKKPGQAPVLVIFKDSERPSGIPQRFS |
| | | | GSSSGTTVTLTISGVQAEDEADYYCQSADSSGTYVVFGGGTKLTVL |
| COV2- | 9308 | heavy | EVQLVESGGGLVQPGGSLRLSCAASGFIFSNFWMNWVRQAPGKGLEWVANIQQDGSEKYYVD |
| 169 | | | SVKGRFTISTDLAKNSLYLQMNSLRAEDTAVYYCARQHGDYDWYFDYWGQGTLVTVSS |
| | 9309 | light | DIQMTQSPSSLSASVGDRVTITCRASQDINNYLAWFQQKPGKAPKSLIYSASSLQSGVPSRF |
| | | | SGSGSGTDFTLTISSLQPEDFATYYCQQYRSYPRTFGQGTKLEIK |
| COV2- | 9310 | heavy | EVQLLESGGGLVQPGGSLRLSCAASGFTFSSYAVYWVRQAPGKGLECVSFISGGGETTDYAD |
| 170 | | | SVKGRFTISRDNSKNTLYLQMNGLRAEDTAVYYCAKSPDATFLWEGEPFGYWGQGTLVTVSS |
| | 9311 | light | EIVLTQSPGTLSLSPGERATLSCRASESVSSNYLAWYQQKPGQAPRLLIYDASSRATGIPDR |
| | | | FSGSGSGTDFTLTISKLEPEDFAVYYCQQYARAPDTFAQGTRLEIK |
| COV2- | 9312 | heavy | QVQLVESGGGVVQPGRSLRLSCAASGFTFSSYAMHWVRQAPGKGLEWVAVISYDGSNKYYAD |
| 171 | | | SVKGRFTISRDNSKNTLYLQMNSLRAEDTAVYYCARDPNPMVLAYFDYWGQGTLVTVSS |
| | 9313 | light | QTVVTQEPSFSVSPGGTVTLTCGLSSGSVSTSYYPSWYQQTPGQAPRTLIYSTNTRSSGVPD |
| | | | RFSGSILGNKAALTITGAQADDESDYYCVLYMGSGIWVFGGGTKLTVL |
| COV2- | 9314 | heavy | EVQLLESGGGLVQPGGSLRLSCAASGFTFSSYAVYWVRQAPGKGLECVSFISGGGETTDYAD |
| 172 | | | SVKGRFTISRDNSKNTLYLQMNGLRAEDTAVYYCAKSPDATFLWFGEPFGYWGQGTLVTVSS |
| | 9315 | light | SYELTQPPSVSVSPGQTARIICSGDALPKQNAYWYQKKPGQAPVLVIFKDSERPSGIPQRFS |
| | | | GSSSGTTVTLTISGVQAEDEADYYCQSADSSGTYVVFGGGTKLTVL |
| COV2- | 9316 | heavy | QVQLVESGGGVVQPGRSLRLSCAASGFNLSNYAMHWVRQASGKGLEWVSLISYDGSIKYYTD |
| 173 | | | SVKGRFTVSGDNSKNTLFLQMNSLRPDDSALYYCVRGGVSGPNSFDMWGQGTTVTVSS |
| | 9317 | light | SYELTQPPSVSVSPGQTARIICSGDALPKQNAYWYQKKPGQAPVLVIFKDSERPSGIPQRFS |
| | | | GSSSGTTVTLTISGVQAEDEADYYCQSADSSGTYVVFGGGTKLTVL |
| COV2- | 9318 | heavy | EVQLVESGGGLVQPGGSLTLSCAASGLTIRNYWNNWVRQAPGKGLEWVANMEEDGSEKNYVD |
| 174 | | | SVKGRFIISRDDAKNSLYLQMNSLRAEDTAVYYCTRDPGPGDFSWGQGTVVTVSS |
| | 9319 | light | EIVLTQSPATLSVSPGERVTLSCRASQTVNNNLNWLQHKPGQAPRLVIIGTSTRASGVPARF |
| | | | SGSGSGTEFTLTISSLQSEDYAIYYCQQYYEWPPITYGQGTRLEI |
| COV2- | 9320 | heavy | QVQLQQSGPGLVRPSGTLSLTCGVSGGSISSPNWWSWVRQAPGKGLEWIGEVYPTGNTYYNP |
| 175 | | | SLKSRVTISIEESKNEFSLNLSSVTAADMGIYYCARGVVGASDFYYYGMDVWGQGTAVTVSS |
| | 9321 | light | EIVMTQSPDSLTVSLGERATISCKSSQSLLYSSNNRDYLAWYQQKAGQPPKLLFYWASTRES |
| | | | GVPDREGGSGSGTHFTLTIYNLQPEDVAVYFCQQYFSPPYTFGQGTKLEIK |
| COV2- | 9322 | heavy | QVQLQESGPGLVKPSQTLSLNCSVSGDSISRSDYHWSWIRQHPGKGLEWIGYIYNNGDTYYN |
| 176 | | | PSLKSRVTMSVDTSKNEFSLKLTSVTAADTAVYYCARDGYAGNSEALDYWGQGTLVTVS |
| | 9323 | light | EIVLTQSPASLSLSPGERATLSCRASQSVTNYLAWYQQRPGQAPRLLIYQTSNRATGIPARF |
| | | | SGSGSGTDFTLTISSLEPEDFAFYYCQQRSHRPGGITFGQGTRLEIK |
| COV2- | 9324 | heavy | EVQLVESGGGLVQPGGSLRLSCAASGFIFSNFWMNWVRQAPGKGLEWVANIQQDGSEKYYVD |
| 177 | | | SVKGRFTISTDLAKNSLYLQMNSLRAEDTAVYYCARQHGDYDWYFDYWGQGTLVTVSS |
| | 9325 | light | DIQMTQSPSSLSASVGDRVTITCQASQDISNYLNWYQQKPGKAPKLLIYDASNLETGVPSRF |
| | | | SGSGSGTDFTFTISSLQPEDIATYYCQQYDNLPLTFGPGTKVDIK |
| COV2- | 9326 | heavy | EVQLVESGGGLVQPGGSLRLSCAASGFIFSNFWMNWVRQAPGKGLEWVANIQQDGSEKYYVD |
| 178 | | | SVKGRFTISTDLAKNSLYLQMNSLRAEDTAVYYCARQHGDYDWYFDYWGQGTLVTVSS |
| | 9327 | light | EIVMTQSPDSLTVSLGERATISCKSSQSLLYSSNNRDYLAWYQQKAGQPPKLLFYWASTRES |
| | | | GVPDRFGGSGSGTHFTLTIYNLQPEDVAVYFCQQYFSPPYTFGQGTKLEIK |
| COV2- | 9328 | heavy | EVQLVESGGGLVKPGESLRLSCAASKFTFSTYHMNWIRQAPGKGLEWVSAISADSTVTTYAD |
| 179 | | | SVRGRFIISRDNDKNSLYLQMNGLRVDDLAVYYCARGRARGSDHTGFDSWGQGTLVTVSS |
| | 9329 | light | DIVMTQSPLSLSVTPGEPASISCRSSQSLLHRNGYNILDWYLQKPGQSPQLLIYLGSNRASG |
| | | | VPDRFSGSGSGTDFTLKISRVEAEDVGVYYCMQGLQTPPYTFGQGTKLEIK |
| COV2- | 9330 | heavy | EVQLVESGGGLVQPGGSLRLSCAASGFIFSNFWMNWVRQAPGKGLEWVANIQQDGSEKYYVD |
| 180 | | | SVKGRFTISTDLAKNSLYLQMNSLRAEDTAVYYCARQHGDYDWYFDYWGQGTLVTVSS |
| | 9331 | light | DIQMTQSPSSLSASVGDRVTITCRASQSITTYLNWYQQKAGKAPNLLIYAPSNLQSGVPSRF |
| | | | SGSGSGTDFTLTISSLQPEDFGTYYCQQSYSSPFTFGPGTKVDIK |
| COV2- | 9332 | heavy | EVQLVESGGGLVQPGGSLRLSCAASGFIFSNFWMNWVRQAPGKGLEWVANIQQDGSEKYYVD |
| 181 | | | SVKGRFTISTDLAKNSLYLQMNSLRAEDTAVYYCARQHGDYDWYFDYWGQGTLVTVSS |
| | 9333 | light | EIVLTQSPATLSVSPGERVTLSCRASQTVNNNLNWLQHKPGQAPRLVIIGTSTRASGVPARF |
| | | | SGSGSGTEFTLTISSLQSEDYAIYYCQQYYEWPPITYGQGTRLEI |
| COV2- | 9334 | heavy | QVQLQQSGPGLVRPSGTLSLTCGVSGGSISSPNWWSWVRQAPGKGLEWIGEVYPTGNTYYNP |
| 182 | | | SLKSRVTISIEESKNEFSLNLSSVTAADMGIYYCARGVVGASDFYYYGMDVWGQGTAVTVSS |
| | 9335 | light | SYELTQPPSVSVSPGQTARIICSGDALPKQNAYWYQKKPGQAPVLVIFKDSERPSGIPQRFS |
| | | | GSSSGTTVTLTISGVQAEDEADYYCQSADSSGTYVVFGGGTKLTVL |
| COV2- | 9336 | heavy | QVQLQESGPGLVKPSETLSLTCTVSGGSISSYYWSWIRQPPGKGLEYIGYIYYSGSTNYNPS |
| 183 | | | LKSRVTISVDTSKNQLSLKLRSVTAADTAVYYCARGFDYWGQGTLVTVSS |
| | 9337 | light | EIVLTQSPGTLSLSPGERATLSCRASQSVSSSYLAWYQQKPGQAPRLLIYGTSSRATGIPDR |
| | | | FSGSGSGTDFTLTISRLEPEDFAVFYCQQYGNSPWTFGQGTKVEIK |
| COV2- | 9338 | heavy | EVQLVESGGGLVQPGGSLTLSCAASGLTIRNYWNNWVRQAPGKGLEWVANMEEDGSEKNYVD |
| 184 | | | SVKGRFIISRDDAKNSLYLQMNSLRAEDTAVYYCTRDPGPGDFSWGQGTVVTVSS |
| | 9339 | light | EIVLTQSPATLSLSPGERATLSCRASQSVSSYLAWYQQKPGQAPRLLIFDASNRATGIPARF |
| | | | SGSGSGTDFTLTISSLEPEDFAVYFCQQRSSWQGITFGGGTKVEIK |
| COV2- | 9340 | heavy | EVQLVESGGGLVQPGGSLRLSCAASGFIFSNFWMNWVRQAPGKGLEWVANIQQDGSEKYYVD |
| 185 | | | SVKGRFTISTDLAKNSLYLQMNSLRAEDTAVYYCARQHGDYDWYFDYWGQGTLVTVSS |
| | 9341 | light | EIVLTQSPATLSLSPGERATLSCRASQSVSSYLAWYQQKPGQAPRLLIFDASNRATGIPARF |
| | | | SGSGSGTDFTLTISSLEPEDFAVYFCQQRSSWQGITFGGGTKVEIK |
| COV2- | 9342 | heavy | QVQLQQSGPGLVRPSGTLSLTCGVSGGSISSPNWWSWVRQAPGKGLEWIGEVYPTGNTYYNP |
| 186 | | | SLKSRVTISIEESKNEFSLNLSSVTAADMGIYYCARGVVGASDFYYYGMDVWGQGTAVTVSS |
| | 9343 | light | EIVLTQSPATPSLSPGERATLSCRASQSVSSYLAWYQQKPGQAPRLLIFDASNRATGIPARF |
| | | | SGSGSGTDFTLTISSLESEDFGTYYCQQYNHWRTFGQGTKVEIK |
| COV2- | 9344 | heavy | EVQLVESGGGLVQPGGSLTLSCAASGLTIRNYWNNWVRQAPGKGLEWVANMEEDGSEKNYVD |
| 187 | | | SVKGRFIISRDDAKNSLYLQMNSLRAEDTAVYYCTRDPGPGDFSWGQGTVVTVSS |
| | 9345 | light | EIVMTQSPDSLTVSLGERATISCKSSQSLLYSSNNRDYLAWYQQKAGQPPKLLFYWASTRES |
| | | | GVPDRFGGSGSGTHFTLTIYNLQPEDVAVYFCQQYFSPPYTFGQGTKLEIK |
| COV2- | 9346 | heavy | EVQLVESGGGLVQPGGSLRLSCAASGFIFSNFWMNWVRQAPGKGLEWVANIQQDGSEKYYVD |
| 188 | | | SVKGRFTISTDLAKNSLYLQMNSLRAEDTAVYYCARQHGDYDWYFDYWGQGTLVTVSS |
| | 9347 | light | EIVLTQSPGTLSLSPGERATLSCRASESVSSNYLAWYQQKPGQAPRLLIYDASSRATGIPDR |
| | | | FSGSGSGTDFTLTISKLEPEDFAVYYCQQYARAPDTFAQGTRLEIK |
| COV2- | 9348 | heavy | QMQLVQSGAEVKKPGSSVKVSCKASGGTFINYAINWVRQAPGQRLEYMGGIIPLLGVANYTQ |
| 189 | | | RFQGRVTNTADRSTSTAYMELSNLAIEDTAVYYCAREYSSSRPLFYTYNYGNDVWGQGTTVT |
| | | | VSS |
| | 9349 | light | DIVMTQTPLSLSVTPGQPASISCKSSQGLLHGDGKTYLYWFLQKAGQPPQLLIYEVSNRFSG |
| | | | VPDRFSGSGSGTDFTLKISRVEAEDVGIYYCMQSVHLPYTFGQGTKLEIK |
| COV2- | 9350 | heavy | EVQLVESGGGLVQPGGSLTLSCAASGLTIRNYWNNWVRQAPGKGLEWVANMEEDGSEKNYVD |
| 190 | | | SVKGRFIISRDDAKNSLYLQMNSLRAEDTAVYYCTRDPGPGDFSWGQGTVVTVSS |
| | 9351 | light | SYELTQPPSVSVSPGQTASITCSGDKLGEKYACWYQQKPGQSPVLVIYQDTKRPSGIPERFS |
| | | | GSNSGNTATLTISGTQAVDEADYYCQAWDYTTVIFGGGTKLTVL |
| COV2- | 9352 | heavy | EVQLVESGGGLVQPGGSLTLSCAASGLTIRNYWNNWVRQAPGKGLEWVANMEEDGSEKNYVD |
| 191 | | | SVKGRFIISRDDAKNSLYLQMNSLRAEDTAVYYCTRDPGPGDFSWGQGTVVTVSS |
| | 9353 | light | EIVLTQSPGTLSLSPGERATLSCRASQSVSSSYLAWYQQKPGQAPRLLIYGASSRATGIPDR |
| | | | FSGSGSGTDFTLTISRLEPEDFAVYYCQQYGSSYTFGQGTKLEIK |
| COV2- | 9354 | heavy | EVQLVESGGGLVQPGGSLTLSCAASGLTIRNYWNNWVRQAPGKGLEWVANMEEDGSEKNYVD |
| 192 | | | SVKGRFIISRDDAKNSLYLQMNSLRAEDTAVYYCTRDPGPGDFSWGQGTVVTVSS |
| | 9355 | light | EIVLTQSPATLSLSPGERATLSCRASQSVSSYLAWYQQKPGQAPRLLIFDASNRATGIPARF |
| | | | SGSGSGTDFTLTISSLQPEDFATYYCQQYRSYPRTFGQGTKLEIK |
| COV2- | 9356 | heavy | EVQLVESGGGLVQPGGSLTLSCAASGLTIRNYWNNWVRQAPGKGLEWVANMEEDGSEKNYVD |
| 193 | | | SVKGRFIISRDDAKNSLYLQMNSLRAEDTAVYYCTRDPGPGDFSWGQGTVVTVSS |
| | 9357 | light | DIQMTQSPSSLSASVGDRVTITCRASQSITTYLNWYQQKAGKAPNLLIYAPSNLQSGVPSRF |
| | | | SGSGSGTDFTLTISSLQPEDEGTYYCQQSYSSPFTEGPGTKVDIK |
| COV2- | 9358 | heavy | QVQLEQSGAEVKRPGSSVKVSCKGDGDTFSTYAITWVRQAPGQGLEWMGRIIPGLDLVDNQQ |
| 194 | | | KFQDRLTITADKSTTTAYMELRSLRSEDTAVYYCARGRRYDFLDGQYTSWYFDIWGRGTLVT |
| | | | VSS |
| | 9359 | light | NIVMTQSPLSLPVTPGEPASMSCRSNQSLLYGNGYNYLDWYLQRPGQSPQLLIFLGSNRASG |
| | | | VPDRFSGSGSGTDFTLKINRVEAEDVGIYYCMQGQENPPTFGPGTKVEIK |
| COV2- | 9360 | heavy | EVQLLESGGGLVQPGGSLRLSCAASGFTFSSYAVYWVRQAPGKGLECVSFISGGGETTDYAD |
| 195 | | | SVKGRFTISRDNSKNTLYLQMNGLRAEDTAVYYCAKSPDATFLWFGEPFGYWGQGTLVTVSS |
| | 9361 | light | EIVMTQSPATLSVSPGERATLSCRASQSVSSNLAWYQQKPGQAPRLLIYGASTRATGIPARF |
| | | | SGSGSGTDFTLTISSLQSEDFAVYYCQQYNNWRTFGQGTKVEIK |
| CR3022 | 9362 | heavy | QMQLVQSGTEVKKPGESLKISCKGSGYGFITYWIGWVRQMPGKGLEWMGIIYPGDSETRYSP |
| | | | SFQGQVTISADKSINTAYLQWSSLKASDTAIYYCAGGSGISTPMDVWGQGTTVTVS |
| | 9363 | light | SVLYSSINKNYLAWYQQKPGQPPKLLIYWASTRESGVPDRFSGSGSGTDFTLTISSLQAEDV |
| | | | AVYYCQQYYSTPYTFGQGTKVEIK |
| COV2- | 9364 | heavy | QVQLQESGPGLVKPSQTLSLTCTVSGGSISSGSHYWSWIRQPAGKGLEWVGRIYTSGSTNYN |
| 122 | | | PSLERRVTISLGTSKNQFYLDLTSVTAADTAVYYCARDSLSGSYHYYYGNDVWGQGTSVTVS |
| | | | S |
| | 9365 | light | QSVLTQPPSASGTPGQRVTISCSGSSSNIGSNYVYWYQHLPGTAPKLLIYRNYQRPSGVPDR |
| | | | FSGSKSGTSASLAISGLRSEDEGDYYCAVWDDSLSGWVFGGGTKLTVL |
| COV2- | 9366 | heavy | QVQLVESGGGVVQPGRSLRLSCAASGFTFISYTMHWVRQAPGKGLEWVALISYDGYNKYYAD |
| 123 | | | SVKGRFTISRDNSKNTLYVQMNSLRAEDTALYYCAREGSPEAFDYWGQGTLVTVSS |
| | 9367 | light | EIVLTQSPATLSVSPGERVTLSCRASQTVNNNLNWLQHKPGQAPRLVIIGTSTRASGVPARF |
| | | | SGSGSGTEFTLTISSLQSEDYAIYYCQQYYEWPPITYGQGTRLEI |
| COV2- | 9368 | heavy | EVQLVESGGGLVQPGGSRRLSCGASGFTFTNHWMSWVRQAPGKGLEWVASIKQDGAEKYYVD |
| 124 | | | YLKGRFTISRDNAKNSLYLQMNSLRVEDTAVYYCARRITMALAGWGWGMDVWGQGTTVRVSS |
| | 9369 | light | DIVMTQSPLSLPVTPGEPASISCRSSRSLLSRNGYNYLDWYLQRPGQSPQLVIYLGSNRASG |
| | | | VPDRFSGSGSGTDFTLKISRVEAEDVGLYYCMQAMQAPLTFGPGTKVEIK |
| COV2- | 9370 | heavy | QVQLVQSGSELKKPGASVKVSCKTSGYTFTSYAINWVRQAPGQGLEWIGWININTGNPTYAQ |
| 125 | | | GFTGRVDFSLDTSVSTAYLQIRSLKAEDTAVYYCARDRGIAARRGYYYYGMDVWGQGTTVTV |
| | | | SS |
| | 9371 | light | SYELTQPPSVSVSPGQTARIICSGDALPKQNAYWYQKKPGQAPVLVIFKDSERPSGIPQRFS |
| | | | GSSSGTTVTLTISGVQAEDEADYYCQSADSSGTYVVFGGGTKLTVL |
| COV2- | 9372 | heavy | QVQLEQSGAEVKRPGSSVKVSCKGDGDTFSTYAITWVRQAPGQGLEWMGRIIPGLDLVDNQQ |
| 126 | | | KFQDRLTITADKSTTTAYMELRSLRSEDTAVYYCARGRRYDFLDGQYTSWYFDIWGRGTLVT |
| | | | VSS |
| | 9373 | light | SYELTQPPSVSVSPGQTARIICSGDALPKQNAYWYQKKPGQAPVLVIFKDSERPSGIPQRFS |
| | | | GSSSGTTVTLTISGVQAEDEADYYCQSADSSGTYVVFGGGTKLTVL |
| COV2- | 9374 | heavy | QVQLQESGPGLVKPSETLSLTCTVSGGSISSYYWSWIRQPPGKGLEYIGYIYYSGSTNYNPS |
| 127 | | | LKSRVTISVDTSKNQLSLKLRSVTAADTAVYYCARGFDYWGQGTLVTVSS |
| | 9375 | light | SYELTQPPSVSVSPGQTARIICSGDALPKQNAYWYQKKPGQAPVLVIFKDSERPSGIPQRFS |
| | | | GSSSGTTVTLTISGVQAEDEADYYCQSADSSGTYVVFGGGTKLTVL |
| COV2- | 9376 | heavy | QVQLQQWGAGLLKPSETLSLTCAVHGGSFSGPYWTWIRQSPSQGLEWIGEIGPRGITYYSPS |
| 128 | | | LESRVTISADTSRNQFSLRLTSVTAADTAVYYCARGLVIGRSSLNFDSWGQGTLVTVSS |
| | 9377 | light | EIVLTQSPGTLSLSPGERATLSCRASESVSSNYLAWYQQKPGQAPRLLIYDASSRATGIPDR |
| | | | FSGSGSGTDFTLTISKLEPEDFAVYYCQQYARAPDTFAQGTRLEIK |
| COV2- | 9378 | heavy | EVQLVEAGGGLVKPGGSLRLSCAASGFTFSGYAINWVRQAPGKGLEWVSSISGNNNDMYYAD |
| 129 | | | SVKGRFTISRDNAKSSVFLQMNSLRVEDTAIYYCARDNLALAGEDYWGQGTLVTVSS |
| | 9379 | light | EIVMTQSPDSLTVSLGERATISCKSSQSLLYSSNNRDYLAWYQQKAGQPPKLLFYWASTRES |
| | | | GVPDRFGGSGSGTHFTLTIYNLQPEDVAVYFCQQYFSPPYTFGQGTKLEIK |
| COV2- | 9380 | heavy | EVQLLESGGGLVQPGGSLRLSCAASGFTFSSYAVYWVRQAPGKGLECVSFISGGGETTDYAD |
| 130 | | | SVKGRFTISRDNSKNTLYLQMNGLRAEDTAVYYCAKSPDATFLWFGEPFGYWGQGTLVTVSS |
| | 9381 | light | EIVMTQSPATLSVSPGERVTLSCRASQSVSSNVAWYQQKPGQAPSLLIYGASTRATGTPARF |
| | | | SGSGSGTGFTLTITSLQSEDEGVYYCQQYNNWRFTFGPGTKVEIK |
| COV2- | 9382 | heavy | EVQLLESGGGLVQPGGSLRLSCAASGFVFSDYSMNWVRLAPGKGLAWVSVVGVDAVTKFYED |
| 131 | | | SVKGRFTISRDNSKNTIYLQMNNLRAEDTAVYHCAKSQPVSRMGRFFVGLDVWGQGTTVTVS |
| | | | S |
| | 9383 | light | EIVMTQSPDSLTVSLGERATISCKSSQSLLYSSNNRDYLAWYQQKAGQPPKLLFYWASTRES |
| | | | GVPDRFGGSGSGTHFTLTIYNLQPEDVAVYFCQQYFSPPYTFGQGTKLEIK |
| COV2- | 9384 | heavy | EVQLVESGGGLVKPGGSLRLSCAASGFTFSSYSMNWVRQAPGKGLEWVSSISSTSSYIYYAD |
| 132 | | | SVKGRFTISRDNAKNSLYLQMNSLRAEDTAVYYCARRRAATGTEFYFDYWGQGTLVTVSS |
| | 9385 | light | QSVLTQPPSVSAAPGQKVTISCSGSSSNIGNNYVSWYQQLPGTAPKLLIYDNNKRPSGIPDR |
| | | | FSGSKSGTSATLGITGLQTGDEADYYCGTWDSSLSAVLFGGGTKLTVL |
| COV2- | 9386 | heavy | QAHLVQSGAEVKKPGSSVKVSCKASGGTFNSHAIGWVRQAPGQGLEWMGRIVPIRKTTTYAP |
| 133 | | | QLQGRLTLTADTSTSTLYMELSSLRSEDSARYYCARVILSGRGFDIWGQGSLVAVSS |
| | 9387 | light | DIQMTQSPSALAASLGDRVIITCQASHDIGHNLNWYQQRPGEAPQLLIYDVSNLQTGVPSRF |
| | | | SGFGFGTNFTFTISGLQSEDIGTYYCQQYDSIFGPGTKLEIK |
| COV2- | 9388 | heavy | QVQLVQSGAEVKKPGSSVKVSCKASGGTFSSYAFSWVRQAPGQGLEWMGRIILILGITDYAP |
| 134 | | | KFQGRVTITADKSTSTVYMEVSSLRSDDTAVYYCARERPRDPSSNYVAYYAMDVWGQGTSVT |
| | | | VSS |
| | 9389 | light | DIQMTQSPSSLSASVGDRVTITCRASQSITTYLNWYQQKAGKAPNLLIYAPSNLQSGVPSRF |
| | | | SGSGSGTDFTLTISSLQPEDEGTYYCQQSYSSPFTFGPGTKVDIK |
| COV2- | 9390 | heavy | QVQLQQSGPGLVRPSGTLSLTCGVSGGSISSPNWWSWVRQAPGKGLEWIGEVYPTGNTYYNP |
| 135 | | | SLKSRVTISIEESKNEFSLNLSSVTAADMGIYYCARGVVGASDFYYYGMDVWGQGTAVTVSS |
| | 9391 | light | DIQMTQSPSSLSASVGDRVTITCRASETISNFLNWYLQRPGKAPQVLIYSAARLQSGVPSRF |
| | | | RASGSGTDFTLTITSLQLEDEGVYYCQQSFNTPRTFGQGTRVEIK |
| COV2- | 9392 | heavy | EVQLVESGGGLVQPGGSLTLSCAASGLTIRNYWNNWVRQAPGKGLEWVANMEEDGSEKNYVD |
| 136 | | | SVKGRFIISRDDAKNSLYLQMNSLRAEDTAVYYCTRDPGPGDFSWGQGTVVTVSS |
| | 9393 | light | EIVLTQSPGTLSLSPGERATLSCRASESVSSNYLAWYQQKPGQAPRLLIYDASSRATGIPDR |
| | | | FSGSGSGTDFTLTISKLEPEDFAVYYCQQYARAPDTFAQGTRLEIK |
| COV2- | 9394 | heavy | QVQLQQWGAGLLKPAETLSLTCAVHGGSFTDSYWSWIRQTPGQGLEWLGEVNHSGSTNYSPS |
| 137 | | | LKTRVAISIDTSKNQVSLRLTSVSAADTAVYYCARGMAVRGRQLYLLGGYDLWGQGTLVTVS |
| | | | S |
| | 9395 | light | EVVMTQSPATLSVSPGERATLSCRASQSVYINLAWYQQKPGQPPRLLIYGASTRATGIPARF |
| | | | SGSGSGTEFTLTISSLESEDFGTYYCQQYNHWRTFGQGTKVEIK |
| COV2- | 9396 | heavy | SQLLQESGPGLVKPSETLSLTCTVFGDSIYGYYWTWIRQPPGRGLEWIGSVYHSGSTNYNPS |
| 138 | | | LMSRVTISVDTSEKQFSLKVTSVTGADTAVYFCARGLAGGGYFDAWGQGNLVAVSS |
| | 9397 | light | DVQMTQSPSSLSASVGDRVTITCRASPGINTYLAWYQQKPGQVPDLLIYGASTLRSGVPSRF |
| | | | SGSGSGTDFTLTISSLQLEDVATYYCQAYYVGLGTFGQGTKVEIK |
| COV2- | 9398 | heavy | EVQLVESGGGVVRPGESLRLSCVGSGFPFGGYGMSWVRQVPGKGLEWVSGINWSADRRVYAD |
| 139 | | | FVKGRFTISRDYPKKSVSLQMDNLRAEDTALYYCARERTSRRDFDFWGQGTLVTVSS |
| | 9399 | light | SFVLTQPPSVSVAPGQTARIPCAKNYRGSQTVHWYQRKPGQAPVLVINSDDDRPSGISERFS |
| | | | GSNSGNTATLTISRVEAGDEADYYCQVWDPSSDQALFAGGTTLTVL |
| COV2- | 9400 | heavy | EVQLVDSGGGLVQPGGSLRLSCAASGFTFTSYWMNWVRQAPGKGLEWVANIKQDGSEKDYVD |
| 140 | | | SVKGRFTISRDNAKNSLYLQMSSLRAEDTAVYYCARDLGSGSYHLFDYWGQGTLVTVSS |
| | 9401 | light | SYELTQPPSVSVSPGQTARIICSGDALPKQNAYWYQKKPGQAPVLVIFKDSERPSGIPQRFS |
| | | | GSSSGTTVTLTISGVQAEDEADYYCQSADSSGTYVVFGGGTKLTVL |
| COV2- | 9402 | heavy | QVQLVQSGSELKKPGASVKVSCKTSGYTFTSYAINWVRQAPGQGLEWIGWININTGNPTYAQ |
| 141 | | | GFTGRVDFSLDTSVSTAYLQIRSLKAEDTAVYYCARDRGIAARRGYYYYGMDVWGQGTTVTV |
| | | | SS |
| | 9403 | light | DIQMTQSPSSLSASVGDRVTITCRASQSITTYLNWYQQKAGKAPNLLIYAPSNLQSGVPSRF |
| | | | SGSGSGTDFTLTISSLQPEDFGTYYCQQSYSSPFTEGPGTKVDIK |
| COV2- | 9404 | heavy | EVQLVESGGGVVRPGESLRLSCVGSGFPFGGYGNSWVRQVPGKGLEWVSGINWSADRRVYAD |
| 142 | | | FVKGRFTISRDYPKKSVSLQMDNLRAEDTALYYCARERTSRRDFDFWGQGTLVTVSS |
| | 9405 | light | SYELTQPPSVSVSPGQTARIICSGDALPKQNAYWYQKKPGQAPVLVIFKDSERPSGIPQRFS |
| | | | GSSSGTTVTLTISGVQAEDEADYYCQSADSSGTYVVFGGGTKLTVL |
| COV2- | 9406 | heavy | EVQLVDSGGGLVQPGGSLRLSCAASGFTFTSYWMNWVRQAPGKGLEWVANIKQDGSEKDYVD |
| 143 | | | SVKGRFTISRDNAKNSLYLQMSSLRAEDTAVYYCARDLGSGSYHLFDYWGQGTLVTVSS |
| | 9407 | light | QSVLTQPPSVSAAPGQKVTISCSGSSSNIGNNYVSWYQQLPGTAPKLLIYDNNKRPSGIPDR |
| | | | FSGSKSGTSATLGITGLQTGDEADYYCGTWDNSLSAWVFGGGTKLTVL |
| COV2- | 9408 | heavy | QVQLQESGPGLVKPSETLSLTCTVSGGSISSYYWSWIRQPPGKGLEYIGYIYYSGSTNYNPS |
| 144 | | | LKSRVTISVDTSKNQLSLKLRSVTAADTAVYYCARGFDYWGQGTLVTVSS |
| | 9409 | light | EIVLTQSPATLSLSPGERATLSCRASQSVSSYLAWYQQKPGQAPRLLIFDASNRATGIPARF |
| | | | SGSGSGTDFTLTISSLEPEDFAVYFCQQRSSWQGITFGGGTKVEIK |
| COV2- | 9410 | heavy | QVQLVQSGSELKKPGASVKISCKTSGYNFTNHPINWVRQAPGQGLEWMGWINTNTGNPTYGQ |
| 145 | | | AFTGRFVFSFDTSVGTAYLHISGLQPGDTAFYYCVREDLRLRQVWWRWFDPWGQGTLVTVSS |
| | 9411 | light | EIQMTQSPSSLSASVGDRVTISCRASQSVGGHLNWYQQKPGKAPKVLIHAASSLEGGVPSRF |
| | | | SGSGSGTDYTLTITNLQPEDFATYFCQQSRNSPATFGQGTKVENK |
| COV2- | 9412 | heavy | QVQLVESGGGVVQPGRSLRLSCAASGFTFSSYAMHWVRQAPGKGLEWVAVISYDGSNKYYAD |
| 146 | | | SVKGRFTISRDNSKNTLYLQMNSLRAEDTAVYYCARGKLGIVGDAFDIWGQGTMVTVSS |
| | 9413 | light | DIQMTQSPSSLSASVGDRVTITCQASQDISNYLNWYQQKPGKAPKLLIYDASNLETGVPSRF |
| | | | SGSGSGTDFTFTISSLQPEDIATYYCQQYDNLPLTFGPGTKVDIK |
| COV2- | 9414 | heavy | SQLLQESGPGLVKPSETLSLTCTVFGDSIYGYYWTWIRQPPGRGLEWIGSVYHSGSTNYNPS |
| 147 | | | LMSRVTISVDTSEKQFSLKVTSVTGADTAVYFCARGLAGGGYFDAWGQGNLVAVSS |
| | 9415 | light | SYELTQPPSVSVSPGQTARIICSGDALPKQNAYWYQKKPGQAPVLVIFKDSERPSGIPQRFS |
| | | | GSSSGTTVTLTISGVQAEDEADYYCQSADSSGTYVVFGGGTKLTVL |
| COV2- | 9416 | heavy | QVQLEQSGAEVKRPGSSVKVSCKGDGDTFSTYAITWVRQAPGQGLEWMGRIIPGLDLVDNQQ |
| 148 | | | KFQDRLTITADKSTTTAYMELRSLRSEDTAVYYCARGRRYDFLDGQYTSWYFDIWGRGTLVT |
| | | | VSS |
| | 9417 | light | EIVLTQSPATLSVSPGERVTLSCRASQTVNNNLNWLQHKPGQAPRLVIIGTSTRASGVPARF |
| | | | SGSGSGTEFTLTISSLQSEDYAIYYCQQYYEWPPITYGQGTRLEI |
| COV2- | 9418 | heavy | EVQLVQSGAEVKKPGATVKISCKVSGYTFTDYYMHWVQQAPGKGLEWMGLVDPEDGETIYAE |
| 149 | | | KFQGRVTITADTSTDTAYMELSSLRSEDTAVYYCATVSRWYYYYYGMDVWGQGTTVTVSS |
| | 9419 | light | EIVLTQSPGTLSLSPGERATLSCRASQSVSSSYLAWYQQKPGQAPRLLIYGASSRATGIPDR |
| | | | FSGSGSGTDFTLTISRLEPEDFAVYYCQQYGSSYTFGQGTKLEIK |
| COV2- | 9420 | heavy | QVQLVESGGGVVQPGRSLRLSCAASGFNLSNYAMHWVRQASGKGLEWVSLISYDGSIKYYTD |
| 150 | | | SVKGRFTVSGDNSKNTLFLQMNSLRPDDSALYYCVRGGVSGPNSEDMWGQGTTVTVSS |
| | 9421 | light | DVVMTQSPLSLPVTLGQPASISCRSSQSLVYSDGNTYVNWFQQRPGQSPRRLIYQVSIRASG |
| | | | VPDRFSGSGSGTDFALKISRVEAEDVGIYYCMQGTHWPVTFGQGTKVEIK |
| COV2- | 9422 | heavy | EVQLLESGGGLVQPGGSLRLSCAASGFVFSDYSMNWVRLAPGKGLAWVSVVGVDAVTKFYED |
| 151 | | | SVKGRFTISRDNSKNTIYLQMNNLRAEDTAVYHCAKSQPVSRMGRFFVGLDVWGQGTTVTVS |
| | | | S |
| | 9423 | light | QSALTQPPSASGSPGQSVTISCTGSSNDVGRYNYVSWYQHHPGKAPRLMISEVVKRPSGVPD |
| | | | RFSGSKSGNTASLTVSGLQAEDEADYYCSSYGGNNILLFGGGTKLTVL |
| COV2- | 9424 | heavy | QVQLVESGGGVVQPGRSLRLSCAASGFTFISYTMHWVRQAPGKGLEWVALISYDGYNKYYAD |
| 152 | | | SVKGRFTISRDNSKNTLYVQMNSLRAEDTALYYCAREGSPEAFDYWGQGTLVTVSS |
| | 9425 | light | SYELTQPPSVSVSPGQTARIICSGDALPKQNAYWYQKKPGQAPVLVIFKDSERPSGIPQRFS |
| | | | GSSSGTTVTLTISGVQAEDEADYYCQSADSSGTYVVFGGGTKLTVL |
| COV2- | 9426 | heavy | EMQLVESGGGLVQPGGSLRLSCAASGFTFSDYYMYWVRQAPGKGLVWVSRIKPDGTGTSYAD |
| 153 | | | SVRGRFTVSRDNAKNTLNLQMNSLRAEDTAVYYCVAYNWNYDFCWGQGTLVTVSA |
| | 9427 | light | DVTVTQSPLSLPVTLGQPASISCRSSQSLVYSDGNTYLNWFQQRPGQSPRRLIYQVSNRDSG |
| | | | VPDRFSGSGSGTDFTLTISRVEAEDVGVYYCMQGSYWPFTFGPGTKVDIK |
| COV2- | 9428 | heavy | EVQLVESGGGLVQPGGSLRLSCSASGFSYSNYWMTWVRQAPGKGLEWVANLRRDGSVEHYVD |
| 154 | | | SVRGRFTISRDNAKNSLYLQMDSLRAEDTAVYYCARDLSPGGLGAYYDVFDIWGQGTMVTVS |
| | | | S |
| | 9429 | light | AIQMTQSPSSLSASLGDRISITCRASQGIGNELGWYQQKPGKAPRLLIYAGSTLQGGVPPRF |
| | | | SGSGSGTDFTLTISSLQAEDFATYYCLQDYAYPRTFGPGTKVEVK |
| COV2- | 9430 | heavy | EVQLLESGGGLVQPGGSLRLSCAASGFVFSDYSMNWVRLAPGKGLAWVSVVGVDAVTKFYED |
| 155 | | | SVKGRFTISRDNSKNTIYLQMNNLRAEDTAVYHCAKSQPVSRMGRFFVGLDVWGQGTTVTVS |
| | | | S |
| | 9431 | light | EIVLTQSPGTLSLSPGERATLSCRASQSVSSSYLAWYQQKPGQAPRLLIYGASSRATGIPDR |
| | | | FSGSGSGTDFTLTISRLEPEDFAVYYCQQYGSSYTFGQGTKLEIK |
| COV2- | 9432 | heavy | EVQLLESGGGLVQPGGSLRLSCAASGFTFSSYAMSWVRQAPGKGLEWVSAISGSGGSTYYAD |
| 156 | | | SVKGRFTISRDNSKNTLYLQMNSLRAEDTAVYYCAKDQHMVRGAIGFDYWGQGTLVTVSS |
| | 9433 | light | EIVMTQSPATLSVSPGERATLSCRASQSVSSNLAWYQQKPGQAPRLLIYGASTRATGIPARF |
| | | | SGSGSGTEFTLTISSLQSEDFAVYYCQQYNNWRTFGQGTKVEIK |
| COV2- | 9434 | heavy | EVQLVESGGGLVQPGGSLRLSCAASGFIFSNFWMNWVRQAPGKGLEWVANIQQDGSEKYYVD |
| 157 | | | SVKGRFTISTDLAKNSLYLQMNSLRAEDTAVYYCARQHGDYDWYFDYWGQGTLVTVSS |
| | 9435 | light | DIQMTQSPSSVSASVGDRVTITCRASQGINSWLAWYQQKPGKAPKLLIYAASSLQSGVPSRF |
| | | | SGSGSGTDFTLTISSLQPEDFATYYCQQAHSFPITFGQGTRLEIK |
| COV2- | 9436 | heavy | EVQLLESGGGLVQPGGSLRLSCAASGFVFSDYSMNWVRLAPGKGLAWVSVVGVDAVTKFYED |
| 158 | | | SVKGRFTISRDNSKNTIYLQMNNLRAEDTAVYHCAKSQPVSRMGRFFVGLDVWGQGTTVTVS |
| | | | S |
| | 9437 | light | SYELTQPPSVSVSPGQTARIICSGDALPKQNAYWYQKKPGQAPVLVIFKDSERPSGIPQRFS |
| | | | GSSSGTTVTLTISGVQAEDEADYYCQSADSSGTYVVFGGGTKLTVL |
| COV2- | 9438 | heavy | QVQLVQSGGGVVQPGRSLRLSCTASGFTFSNYAMHWVRQAPGKGLENGAVISYDGTITLYED |
| 159 | | | SMRGRFTISRDNSRDTLYLQMNSLRPDDTAVYYCGRDLSGGGLDVWGQGTTVTVSS |
| | 9439 | light | QSALTQARSVSGSPGQSVTVSCTGSSNDVGGHNYVSWYQHSPGKAPKLIIYDVTKRPSGVPD |
| | | | RFSGSKSGDTASLTISGLQADDEGDYYCCSYKSTYDYVFGSGTTVSVL |
| COV2- | 9440 | heavy | QVQLVESGGGVVQPGRSLRLSCAASGFTFSIYAIHWVRQAPGKGLEWMAVISYDGNNQYYAD |
| 160 | | | SVKGRFTISRDNSKNTLYLQMNSLRTDDTAVYYCARSEGGGYHDAFDIWGQGTMVTVSS |
| | 9441 | light | QLVLTQSPSASASLGASVKLTCTLSSGHSSYAIAWHQQQPEKGPRYLNKLNSDGSHNKGDGI |
| | | | PDRFSGSSSGAERYLTISSLQSEDEADYFCQTWGTGIHVFGGGTKLTVL |
| COV2- | 9442 | heavy | QVQLVESGGGVVQPGRSLRLSCAASGFTFISYTMHWVRQAPGKGLEWVALISYDGYNKYYAD |
| 161 | | | SVKGRFTISRDNSKNTLYVQMNSLRAEDTALYYCAREGSPEAFDYWGQGTLVTVSS |
| | 9443 | light | SFELTQPPSLSVSPGQTARITCSGDALSKQFTYWYQQKPGQAPVLVIYKDSERPSGIPERFS |
| | | | GSSSGTTVTLTISGVQAEDEADYYCQSAHSSGFYRVVFGGGTKLTVL |
| COV2- | 9444 | heavy | EVQLLESGGGLVQPGGSLRLSCAASGFTFSSYAVYWVRQAPGKGLECVSFISGGGETTDYAD |
| 162 | | | SVKGRFTISRDNSKNTLYLQMNGLRAEDTAVYYCAKSPDATFLWFGEPFGYWGQGTLVTVSS |
| | 9445 | light | EIVLTQSPATLSVSPGERVTLSCRASQTVNNNLNWLQHKPGQAPRLVIIGTSTRASGVPARF |
| | | | SGSGSGTEFTLTISSLQSEDYAIYYCQQYYEWPPITYGQGTRLEI |
| COV2- | 9446 | heavy | QVQLEQSGAEVKRPGSSVKVSCKGDGDTFSTYAITWVRQAPGQGLEWMGRIIPGLDLVDNQQ |
| 163 | | | KFQDRLTITADKSTTTAYMELRSLRSEDTAVYYCARGRRYDFLDGQYTSWYFDIWGRGTLVT |
| | | | VSS |
| | 9447 | light | EIVMTQSPDSLTVSLGERATISCKSSQSLLYSSNNRDYLAWYQQKAGQPPKLLFYWASTRES |
| | | | GVPDRFGGSGSGTHFTLTIYNLQPEDVAVYFCQQYFSPPYTFGQGTKLEIK |
| COV2- | 9448 | heavy | EVQLVESGGGLVQPGGSLRLSCAASGFIFSNFWMNWVRQAPGKGLEWVANIQQDGSEKYYVD |
| 164 | | | SVKGRFTISTDLAKNSLYLQMNSLRAEDTAVYYCARQHGDYDWYFDYWGQGTLVTVSS |
| | 9449 | light | EIVLTQSPGTLSLSPGERATLSCRASQSVSSSYLAWYQQKPGQAPRLLIYGASSRATGIPDR |
| | | | FSGSGSGTDFTLTISRLEPEDFAVYYCQQYGSSYTFGQGTKLEIK |
| COV2- | 9450 | heavy | EVQLVESGGGLVQPGGSLTLSCAASGLTIRNYWNNWVRQAPGKGLEWVANMEEDGSEKNYVD |
| 165 | | | SVKGRFIISRDDAKNSLYLQMNSLRAEDTAVYYCTRDPGPGDFSWGQGTVVTVSS |
| | 9451 | light | SYELTQPPSVSVSPGQTARIICSGDALPKQNAYWYQKKPGQAPVLVIFKDSERPSGIPQRFS |
| | | | GSSSGTTVTLTISGVQAEDEADYYCQSADSSGTYVVFGGGTKLTVL |

TABLE 3
HEAVY CHAIN SEQUENCES

| Clone | CDRH1 | CDRH2 | CDRH3 |
|---|---|---|---|
| COV2-166 | GNTFPTYD | INTNTGSP | AREGYHYGMDV |
| | 9452 | 9453 | 9454 |
| COV2-167 | GGTFNSHA | IVPIRKTT | ARVILSGRGFDI |
| | 9455 | 9456 | 9457 |
| COV2-168 | GFIFSNFW | IQQDGSEK | ARQHGDYDWYFDY |
| | 9458 | 5459 | 9460 |
| COV2-169 | GFIFSNFW | IQQDGSEK | ARQHGDYDWYFDY |
| | 9461 | 9462 | 9463 |
| COV2-170 | GFTFSSYA | ISGGGETT | AKSPDATFLWFGEPFGY |
| | 9464 | 9465 | 9466 |
| COV2-171 | GFTFSSYA | ISYDGSNK | ARDPNPMVLAYFDY |
| | 9467 | 9468 | 9469 |
| COV2-172 | GFTFSSYA | ISGGGETT | AKSPDATFLWFGEPFGY |
| | 9470 | 9471 | 9472 |
| COV2-173 | GFNLSNYA | ISYDGSIK | VRGGVSGPNSFDM |
| | 9473 | 9474 | 9475 |
| COV2-174 | GLTIRNYW | MEEDGSEK | TRDPGPGDFS |
| | 9476 | 9477 | 9478 |
| COV2-175 | GGSISSPNW | VYPTGNT | ARGVVGASDFYYYGMDV |
| | 9479 | 9480 | 9481 |
| COV2-176 | GDSISRSDYH | IYNNGDT | ARDGYAGNSEALDY |
| | 9482 | 9483 | 9484 |
| COV2-177 | GFIFSNFW | IQQDGSEK | ARQHGDYDWYFDY |
| | 9485 | 9486 | 9487 |
| COV2-178 | GFIFSNFW | IQQDGSEK | ARQHGDYDWYFDY |
| | 9488 | 9489 | 9490 |
| COV2-179 | KFTFSTYH | ISADSTVT | ARGRARGSDHTGFDS |
| | 9491 | 9492 | 9493 |
| COV2-180 | GFIFSNFW | IQQDGSEK | ARQHGDYDWYFDY |
| | 9494 | 9495 | 9496 |
| COV2-181 | GFIFSNFW | IQQDGSEK | ARQHGDYDWYFDY |
| | 9497 | 9498 | 9499 |
| COV2-182 | GGSISSPNW | VYPTGNT | ARGVVGASDFYYYGMDV |
| | 9500 | 9501 | 9502 |
| COV2-183 | GGSISSYY | IYYSGST | ARGFDY |
| | 9503 | 9504 | 9505 |
| COV2-184 | GLTIRNYW | MEEDGSEK | TRDPGPGDFS |
| | 9506 | 9507 | 9508 |
| COV2-185 | GFIFSNFW | IQQDGSEK | ARQHGDYDWYFDY |
| | 9509 | 9510 | 9511 |
| COV2-186 | GGSISSPNW | VYPTGNT | ARGVVGASDFYYYGMDV |
| | 9512 | 9513 | 9514 |
| COV2-187 | GLTIRNYW | MEEDGSEK | TRDPGPGDFS |
| | 9515 | 9516 | 9517 |
| COV2-188 | GFIFSNFW | IQQDGSEK | ARQHGDYDWYFDY |
| | 9518 | 9519 | 9520 |
| COV2-189 | GGTFINYA | IIPLLGVA | AREYSSSRPLFYTYNYGMDV |
| | 9521 | 9522 | 9523 |
| COV2-190 | GLTIRNYW | MEEDGSEK | TRDPGPGDFS |
| | 9524 | 9525 | 9526 |
| COV2-191 | GLTIRNYW | MEEDGSEK | TRDPGPGDFS |
| | 9527 | 9528 | 9529 |
| COV2-192 | GLTIRNYW | MEEDGSEK | TRDPGPGDFS |
| | 9530 | 9531 | 9532 |
| COV2-193 | GLTIRNYW | MEEDGSEK | TRDPGPGDFS |
| | 9533 | 9534 | 9535 |
| COV2-194 | GDTFSTYA | IIPGLDLV | ARGRRYDFLDGQYTSWYFDI |
| | 9536 | 9537 | 9538 |
| COV2-195 | GFTFSSYA | ISGGGETT | AKSPDATFLWFGEPFGY |
| | 9539 | 9540 | 9541 |
| CR3022 | GYGFITYW | IYPGDSET | AGGSGISTPMDV |
| | 9542 | 9543 | 9544 |
| COV2-122 | GGSISSGSHY | IYTSGST | ARDSLSGSYHYYYGMDV |
| | 9545 | 9546 | 9547 |
| COV2-123 | GFTFISYT | ISYDGYNK | AREGSPEAFDY |
| | 9548 | 9549 | 9550 |
| COV2-124 | GFTFTNHW | IKQDGAEK | ARRITMALAGWGWGMDV |
| | 9551 | 9552 | 9553 |
| COV2-125 | GYTFTSYA | ININTGNP | ARDRGIAARRGYYYYGMDV |
| | 9554 | 9555 | 9556 |
| COV2-126 | GDTFSTYA | IIPGLDLV | ARGRRYDFLDGQYTSWYFDI |
| | 9557 | 9558 | 9559 |
| COV2-127 | GGSISSYY | IYYSGST | ARGFDY |
| | 9560 | 9561 | 9562 |
| COV2-128 | GGSFSGPY | IGPRGIT | ARGLVIGRSSLNFDS |
| | 9563 | 9564 | 9565 |
| COV2-129 | GFTFSGYA | ISGNNNDM | ARDNLALAGEDY |
| | 9566 | 9567 | 9568 |
| COV2-130 | GFTFSSYA | ISGGGETT | AKSPDATFLWFGEPFGY |
| | 9569 | 9570 | 9571 |
| COV2-131 | GFVFSDYS | VGVDAVTK | AKSQPVSRMGRFFVGLDV |
| | 9572 | 9573 | 9574 |
| COV2-132 | GFTFSSYS | ISSTSSYI | ARRRAATGTEFYFDY |
| | 9575 | 9576 | 9577 |
| COV2-133 | GGTFNSHA | IVPIRKTT | ARVILSGRGFDI |
| | 9578 | 9579 | 9580 |
| COV2-134 | GGTFSSYA | IILILGIT | ARERPRDPSSNYVAYYAMDV |
| | 9581 | 9582 | 9583 |
| COV2-135 | GGSISSPNW | VYPTGNT | ARGVVGASDFYYYGMDV |
| | 9584 | 9585 | 9586 |
| COV2-136 | GLTIRNYW | MEEDGSEK | TRDPGPGDFS |
| | 9587 | 9588 | 9589 |
| COV2-137 | GGSFTDSY | VNHSGST | ARGMAVRGRQLYLLGGYDL |
| | 9590 | 9591 | 9592 |
| COV2-138 | GDSIYGYY | VYHSGST | ARGLAGGGYFDA |
| | 9593 | 9594 | 9595 |
| COV2-139 | GFPFGGYG | INWSADRR | ARERTSRRDFDF |
| | 9596 | 9597 | 9598 |
| COV2-140 | GFTFTSYW | IKQDGSEK | ARDLGSGSYHLFDY |
| | 9599 | 9600 | 9601 |
| COV2-141 | GYTFTSYA | ININTGNP | ARDRGIAARRGYYYYGMDV |
| | 9602 | 9603 | 9604 |
| COV2-142 | GFPFGGYG | INWSADRR | ARERTSRRDFDF |
| | 9605 | 9606 | 9607 |
| COV2-143 | GFTFTSYW | IKQDGSEK | ARDLGSGSYHLFDY |
| | 9608 | 9609 | 9610 |
| COV2-144 | GGSISSYY | IYYSGST | ARGFDY |
| | 9611 | 9612 | 9613 |
| COV2-145 | GYNFTNHP | INTNTGNP | VREDLRLRQVWWRWFDP |
| | 9614 | 9615 | 9616 |
| COV2-146 | GFTFSSYA | ISYDGSNK | ARGKLGIVGDAFDI |
| | 9617 | 9618 | 9619 |
| COV2-147 | GDSIYGYY | VYHSGST | ARGLAGGGYFDA |
| | 9620 | 9621 | 9622 |
| COV2-148 | GDTFSTYA | IIPGLDLV | ARGRRYDFLDGQYTSWYFDI |
| | 9623 | 9624 | 9625 |
| COV2-149 | GYTFTDYY | VDPEDGET | ATVSRWYYYYYGMDV |
| | 9626 | 9627 | 9628 |
| COV2-150 | GFNLSNYA | ISYDGSIK | VRGGVSGPNSFDM |
| | 9629 | 9630 | 9631 |
| COV2-151 | GFVFSDYS | VGVDAVTK | AKSQPVSRMGRFFVGLDV |
| | 9632 | 9633 | 9634 |
| COV2-152 | GFTFISYT | ISYDGYNK | AREGSPEAFDY |
| | 9635 | 9636 | 9637 |
| COV2-153 | GFTFSDYY | IKPDGTGT | VAYNWNYDFC |
| | 9638 | 9639 | 9640 |
| COV2-154 | GFSYSNYW | LRRDGSVE | ARDLSPGGLGAYYDVFDI |
| | 9641 | 9642 | 9643 |
| COV2-155 | GFVFSDYS | VGVDAVTK | AKSQPVSRMGRFFVGLDV |
| | 9644 | 9645 | 9646 |
| COV2-156 | GFTFSSYA | ISGSGGST | AKDQHMVRGAIGFDY |
| | 9647 | 9648 | 9649 |
| COV2-157 | GFIFSNFW | IQQDGSEK | ARQHGDYDWYFDY |
| | 9650 | 9651 | 9652 |
| COV2-158 | GFVFSDYS | VGVDAVTK | AKSQPVSRMGRFFVGLDV |
| | 9653 | 9654 | 9655 |
| COV2-159 | GFTFSNYA | ISYDGTIT | GRDLSGGGLDV |
| | 9656 | 9657 | 9658 |
| COV2-160 | GFTFSIYA | ISYDGNNQ | ARSEGGGYHDAFDI |
| | 9659 | 9660 | 9661 |
| COV2-161 | GFTFISYT | ISYDGYNK | AREGSPEAFDY |
| | 9662 | 9663 | 9664 |
| COV2-162 | GFTFSSYA | ISGGGETT | AKSPDATFLWFGEPFGY |
| | 9665 | 9666 | 9667 |
| COV2-163 | GDTFSTYA | IIPGLDLV | ARGRRYDFLDGQYTSWYFDI |
| | 9668 | 9669 | 9670 |
| COV2-164 | GFIFSNFW | IQQDGSEK | ARQHGDYDWYFDY |
| | 9671 | 9672 | 9673 |
| COV2-165 | GLTIRNYW | MEEDGSEK | TRDPGPGDFS |
| | 9674 | 9675 | 9676 |

TABLE 4
LIGHT CHAIN SEQUENCES

| Clone | CDRL1 | CDRL2 | CDRL3 |
|---|---|---|---|
| COV2-166 | QDINNY | SAS | QQYRSYPRT |
| | 9677 | 9678 | 9679 |
| COV2-167 | ALPKQN | KDS | QSADSSGTYVV |
| | 9680 | 9681 | 9682 |
| COV2-168 | ALPKQN | KDS | QSADSSGTYVV |
| | 9683 | 9684 | 9685 |
| COV2-169 | QDINNY | SAS | QQYRSYPRT |
| | 9686 | 9687 | 9688 |
| COV2-170 | ESVSSNY | DAS | QQYARAPDT |
| | 9689 | 9690 | 9691 |
| COV2-171 | SGSVSTSYY | STN | VLYMGSGIWV |
| | 9692 | 9693 | 9694 |
| COV2-172 | ALPKQN | KDS | QSADSSGTYVV |
| | 9695 | 9696 | 9697 |
| COV2-173 | ALPKQN | KDS | QSADSSGTYVV |
| | 9698 | 9699 | 9700 |
| COV2-174 | QTVNNN | GTS | QQYYEWPPIT |
| | 9701 | 9702 | 9703 |
| COV2-175 | QSLLYSSNNRDY | WAS | QQYFSPPYT |
| | 9704 | 9705 | 9706 |
| COV2-176 | QSVTNY | QTS | QQRSHRPGGIT |
| | 9707 | 9708 | 9709 |
| COV2-177 | QDISNY | DAS | QQYDNLPLT |
| | 9710 | 9711 | 9712 |
| COV2-178 | QSLLYSSNNRDY | WAS | QQYFSPPYT |
| | 9713 | 9714 | 9715 |
| COV2-179 | QSLLHRNGYNI | LGS | MQGLQTPPYT |
| | 9716 | 9717 | 9718 |
| COV2-180 | QSITTY | APS | QQSYSSPFT |
| | 9719 | 9720 | 9721 |
| COV2-181 | QTVNNN | GTS | QQYYEWPPIT |
| | 9722 | 9723 | 9724 |
| COV2-182 | ALPKQN | KDS | QSADSSGTYVV |
| | 9725 | 9726 | 9727 |
| COV2-183 | QSVSSSY | GTS | QQYGNSPWT |
| | 9728 | 9729 | 9730 |
| COV2-184 | QSVSSY | DAS | QQRSSWQGIT |
| | 9731 | 9732 | 9733 |
| COV2-185 | QSVSSY | DAS | QQRSSWQGIT |
| | 9734 | 9735 | 9736 |
| COV2-186 | QSVSSY | DAS | QQYNHWRT |
| | 9737 | 9738 | 9739 |
| COV2-187 | QSLLYSSNNRDY | WAS | QQYFSPPYT |
| | 9740 | 9741 | 9742 |
| COV2-188 | ESVSSNY | DAS | QQYARAPDT |
| | 9743 | 9744 | 9745 |
| COV2-189 | QGLLHGDGKTY | EVS | MQSVHLPYT |
| | 9746 | 9747 | 9748 |
| COV2-190 | KLGEKY | QDT | QAWDYTTVI |
| | 9749 | 9750 | 9751 |
| COV2-191 | QSVSSSY | GAS | QQYGSSYT |
| | 9752 | 9753 | 9754 |
| COV2-192 | QSVSSY | DAS | QQYRSYPRT |
| | 9755 | 9756 | 9757 |
| COV2-193 | QSITTY | APS | QQSYSSPFT |
| | 9758 | 9759 | 9760 |
| COV2-194 | QSLLYGNGYNY | LGS | MQGQENPPT |
| | 9761 | 9762 | 9763 |
| COV2-195 | QSVSSN | GAS | QQYNNWRT |
| | 9764 | 9765 | 9766 |
| CR3022 | SVLYSSINKNY | WAS | QQYYSTPYT |
| | 9767 | 9768 | 9769 |
| COV2-122 | SSNIGSNY | RNY | AVWDDSLSGWV |
| | 9770 | 9771 | 9772 |
| COV2-123 | QTVNNN | GTS | QQYYEWPPIT |
| | 9773 | 9774 | 9775 |
| COV2-124 | RSLLSRNGYNY | LGS | MQAMQAPLT |
| | 9776 | 9777 | 9778 |
| COV2-125 | ALPKQN | KDS | QSADSSGTYVV |
| | 9779 | 9780 | 9781 |
| COV2-126 | ALPKQN | KDS | QSADSSGTYVV |
| | 9782 | 9783 | 9784 |
| COV2-127 | ALPKQN | KDS | QSADSSGTYVV |
| | 9785 | 9786 | 9787 |
| COV2-128 | ESVSSNY | DAS | QQYARAPDT |
| | 9788 | 9789 | 9790 |
| COV2-129 | QSLLYSSNNRDY | WAS | QQYFSPPYT |
| | 9791 | 9792 | 9793 |
| COV2-130 | QSVSSN | GAS | QQYNNWRFT |
| | 9794 | 9795 | 9796 |
| COV2-131 | QSLLYSSNNRDY | WAS | QQYFSPPYT |
| | 9797 | 9798 | 9799 |
| COV2-132 | SSNIGNNY | DNN | GTWDSSLSAVL |
| | 9800 | 9801 | 9802 |
| COV2-133 | HDIGHN | DVS | QQYDSI |
| | 9803 | 9804 | 9805 |
| COV2-134 | QSITTY | APS | QQSYSSPFT |
| | 9806 | 9807 | 9808 |
| COV2-135 | ETISNF | SAA | QQSFNTPRT |
| | 9809 | 9810 | 9811 |
| COV2-136 | ESVSSNY | DAS | QQYARAPDT |
| | 9812 | 9813 | 9814 |
| COV2-137 | QSVYIN | GAS | QQYNHWRT |
| | 9815 | 9816 | 9817 |
| COV2-138 | PGINTY | GAS | QAYYVGLGT |
| | 9818 | 9819 | 9820 |
| COV2-139 | YRGSQT | SDD | QVWDPSSDQAL |
| | 9821 | 9822 | 9823 |
| COV2-140 | ALPKQN | KDS | QSADSSGTYVV |
| | 9824 | 9825 | 9826 |
| COV2-141 | QSITTY | APS | QQSYSSPFT |
| | 9827 | 9828 | 9829 |
| COV2-142 | ALPKQN | KDS | QSADSSGTYVV |
| | 9830 | 9831 | 9832 |
| COV2-143 | SSNIGNNY | DNN | GTWDNSLSAWV |
| | 9833 | 9834 | 9835 |
| COV2-144 | QSVSSY | DAS | QQRSSWQGIT |
| | 9836 | 9837 | 9838 |
| COV2-145 | QSVGGH | AAS | QQSRNSPAT |
| | 9839 | 9840 | 9841 |
| COV2-146 | QDISNY | DAS | QQYDNLPLT |
| | 9842 | 9843 | 9844 |
| COV2-147 | ALPKQN | KDS | QSADSSGTYVV |
| | 9845 | 9846 | 9847 |
| COV2-148 | QTVNNN | GTS | QQYYEWPPIT |
| | 9848 | 9849 | 9850 |
| COV2-149 | QSVSSSY | GAS | QQYGSSYT |
| | 9851 | 9852 | 9853 |
| COV2-150 | QSLVYSDGNTY | QVS | MQGTHWPVT |
| | 9854 | 9855 | 9856 |
| COV2-151 | SNDVGRYNY | EVV | SSYGGNNILL |
| | 9857 | 9858 | 9859 |
| COV2-152 | ALPKQN | KDS | QSADSSGTYVV |
| | 9860 | 9861 | 9862 |
| COV2-153 | QSLVYSDGNTY | QVS | MQGSYWPFT |
| | 9863 | 9864 | 9865 |
| COV2-154 | QGIGNE | AGS | LQDYAYPRT |
| | 9866 | 9867 | 9868 |
| COV2-155 | QSVSSSY | GAS | QQYGSSYT |
| | 9869 | 9870 | 9871 |
| COV2-156 | QSVSSN | GAS | QQYNNWRT |
| | 9872 | 9873 | 9874 |
| COV2-157 | QGINSW | AAS | QQAHSFPIT |
| | 9875 | 9876 | 9877 |
| COV2-158 | ALPKQN | KDS | QSADSSGTYVV |
| | 9878 | 9879 | 9880 |
| COV2-159 | SNDVGGHNY | DVT | CSYKSTYDYV |
| | 9881 | 9882 | 9883 |
| COV2-160 | SGHSSYA | LNSDGSH | QTWGTGIHV |
| | 9884 | 9885 | 9886 |
| COV2-161 | ALSKQF | KDS | QSAHSSGFYRVV |
| | 9887 | 9888 | 9889 |
| COV2-162 | QTVNNN | GTS | QQYYEWPPIT |
| | 9890 | 9891 | 9892 |
| COV2-163 | QSLLYSSNNRDY | WAS | QQYFSPPYT |
| | 9893 | 9894 | 9895 |
| COV2-164 | QSVSSSY | GAS | QQYGSSYT |
| | 9896 | 9897 | 9898 |
| COV2-165 | ALPKQN | KDS | QSADSSGTYVV |
| | 9899 | 9900 | 9901 |

[0273] All of the compositions and methods disclosed and claimed herein can be made and executed without undue experimentation in light of the present disclosure. While the compositions and methods of this disclosure have been described in terms of preferred embodiments, it will be apparent to those of skill in the art that variations may be applied to the compositions and methods and in the steps or in the sequence of steps of the method described herein without departing from the concept, spirit and scope of the disclosure. More specifically, it will be apparent that certain agents which are both chemically and physiologically related may be substituted for the agents described herein while the same or similar results would be achieved. All such similar substitutes and modifications apparent to those skilled in the art are deemed to be within the spirit, scope and concept of the disclosure as defined by the appended claims.

### VII. REFERENCES

[0274] The following references, to the extent that they provide exemplary procedural or other details supplementary to those set forth herein, are specifically incorporated herein by reference.
[0275] U.S. Pat. No. 3,817,837
[0276] U.S. Pat. No. 3,850,752
[0277] U.S. Pat. No. 3,939,350
[0278] U.S. Pat. No. 3,996,345
[0279] U.S. Pat. No. 4,196,265
[0280] U.S. Pat. No. 4,275,149
[0281] U.S. Pat. No. 4,277,437
[0282] U.S. Pat. No. 4,366,241
[0283] U.S. Pat. No. 4,472,509
[0284] U.S. Pat. No. 4,554,101
[0285] U.S. Pat. No. 4,680,338
[0286] U.S. Pat. No. 4,816,567
[0287] U.S. Pat. No. 4,867,973
[0288] U.S. Pat. No. 4,938,948
[0289] U.S. Pat. No. 5,021,236
[0290] U.S. Pat. No. 5,141,648
[0291] U.S. Pat. No. 5,196,066
[0292] U.S. Pat. No. 5,563,250
[0293] U.S. Pat. No. 5,565,332
[0294] U.S. Pat. No. 5,856,456
[0295] U.S. Pat. No. 5,880,270
[0296] U.S. Pat. No. 6,485,982
[0297] “Antibodies: A Laboratory Manual,” Cold Spring Harbor Press, Cold Spring Harbor, N.Y., 1988.
[0298] Abbondanzo et al., Am. J. Pediatr. Hematol. Oncol., 12(4), 480-489, 1990.
[0299] Allred et al., Arch. Surg., 125(1), 107-113, 1990.
[0300] Atherton et al., Biol. of Reproduction, 32, 155-171, 1985.
[0301] Barzon et al., Euro Surveill. 2016 Aug. 11; 21(32).
[0302] Beltramello et al., Cell Host Microbe 8, 271-283, 2010.
[0303] Brown et al., J. Immunol. Meth., 12; 130(1), 111-121, 1990.
[0304] Campbell, In: Monoclonal Antibody Technology, Laboratory Techniques in Biochemistry and Molecular Biology, Vol. 13, Burden and Von Knippenberg, Eds. pp. 75-83, Amsterdam, Elsevier, 1984.
[0305] Capaldi et al., Biochem. Biophys. Res. Comm., 74(2):425-433, 1977.
[0306] De Jager et al., Semin. Nucl. Med. 23(2), 165-179, 1993.
[0307] Dholakia et al., J. Biol. Chem., 264, 20638-20642, 1989.
[0308] Diamond et al., J Virol 77, 2578-2586, 2003.
[0309] Doolittle and Ben-Zeev, Methods Mol. Biol., 109, 215-237, 1999.
[0310] Duffy et al., N. Engl. J. Med. 360, 2536-2543, 2009.
[0311] Elder et al. Infections, infertility and assisted reproduction. Part II: Infections in reproductive medicine & Part III: Infections and the assisted reproductive laboratory. Cambridge UK: Cambridge University Press; 2005.
[0312] Gefter et al., Somatic Cell Genet., 3:231-236, 1977.
[0313] Gornet et al., Semin Reprod Med. 2016 September; 34(5):285-292. Epub 2016 Sep. 14.
[0314] Gulbis and Galand, Hum. Pathol. 24(12), 1271-1285, 1993.
[0315] Halfon et al., PLoS ONE 2010; 5 (5) e10569
[0316] Hessell et al., Nature 449, 101-4, 2007.
[0317] Khatoon et al., Ann. of Neurology, 26, 210-219, 1989.
[0318] King et al., J. Biol. Chem., 269, 10210-10218, 1989.
[0319] Kohler and Milstein, Eur. J. Immunol., 6, 511-519, 1976.
[0320] Kohler and Milstein, Nature, 256, 495-497, 1975.
[0321] Kyte and Doolittle, J. Mol. Biol., 157(1):105-132, 1982.
[0322] Mansuy et al., Lancet Infect Dis. 2016 October; 16(10):1106-7.
[0323] Nakamura et al., In: Enzyme Immunoassays: Heterogeneous and Homogeneous Systems, Chapter 27, 1987.
[0324] O'Shannessy et al., J. Immun. Meth., 99, 153-161, 1987.
[0325] Persic et al., Gene 187:1, 1997
[0326] Potter and Haley, Meth. Enzymol., 91, 613-633, 1983.
[0327] Purpura et al., Lancet Infect Dis. 2016 October; 16(10):1107-8. Epub 2016 Sep. 19. Remington's Pharmaceutical Sciences, 15th Ed., 3:624-652, 1990.
[0328] Tang et al., J. Biol. Chem., 271:28324-28330, 1996.
[0329] Wawrzynczak & Thorpe, In: Immunoconjugates, Antibody Conjugates In Radioimaging And Therapy Of Cancer, Vogel (Ed.), NY, Oxford University Press, 28, 1987.
[0330] Yu et al., J Immunol Methods 336, 142-151, doi:10.1016/j.jim.2008.04.008, 2008.

The application's sequence listing, which the Patent Office published only in electronic form, follows.

SEQUENCE LISTING (9901 sequences)

SEQ ID NO: 1 - protein, 11 aa, Artificial Sequence
  Description of Artificial Sequence: Synthetic antibody
CSYAGSSTVVF

SEQ ID NO: 2 - DNA, 129 bp, Artificial Sequence
  Description of Artificial Sequence: Synthetic antibody
ttctatcgcttctctggctccaagtctggcaacacggcctccctgacaatctctgggctccaggctgaggacgaggctgattattactgctgctcatatgcaggtagtagcactgtggtattcggcgga

SEQ ID NO: 3 - protein, 43 aa, Artificial Sequence
  Description of Artificial Sequence: Synthetic antibody
FYRFSGSKSGNTASLTISGLQAEDEADYYCCSYAGSSTVVFGG

SEQ ID NO: 4 - DNA, 129 bp, Artificial Sequence
  Description of Artificial Sequence: Synthetic antibody
ttcaatcgcttctctggctccaagtctggcaacacggcctccctgacaatctctgggctccaggctgaggacgaggctgattattactgctgctcatatgcaggtagtagcactgtggtattcggcgga

SEQ ID NO: 5 - protein, 43 aa, Artificial Sequence
  Description of Artificial Sequence: Synthetic antibody
FNRFSGSKSGNTASLTISGLQAEDEADYYCCSYAGSSTVVFGG

SEQ ID NO: 6 - DNA, 129 bp, Artificial Sequence
  Description of Artificial Sequence: Synthetic antibody
tgtaatcgcttctctggctccaagtctggcatcacggcctccctgacaatctctgggctccaggctgaggacgaggctgattattactgctgctcatatgcaggtagtagcactgtggtattcggcgga

SEQ ID NO: 7 - protein, 43 aa, Artificial Sequence
  Description of Artificial Sequence: Synthetic antibody
CNRFSGSKSGITASLTISGLQAEDEADYYCCSYAGSSTVVFGG

SEQ ID NO: 8 - DNA, 129 bp, Artificial Sequence
  Description of Artificial Sequence: Synthetic antibody
tcttatcgcttctctggctccaagtctggcaacacggcctccctgacaatctcttggctccaggctgaggacgaggctgattattactgctgctcatatgcaggtagtagcactgtggtattcggcgga

SEQ ID NO: 9 - protein, 43 aa, Artificial Sequence
  Description of Artificial Sequence: Synthetic antibody
SYRFSGSKSGNTASLTISWLQAEDEADYYCCSYAGSSTVVFGG

SEQ ID NO: 10 - DNA, 129 bp, Artificial Sequence
  Description of Artificial Sequence: Synthetic antibody
tctcatcgcttctctggctccaagtctggcatcacggcctccctgacaatctctgggctccaggctgaggacgaggctgattattactgctgctcatatgcaggtagtagcactgtagtattcggcgga

SEQ ID NO: 11 - protein, 43 aa, Artificial Sequence
  Description of Artificial Sequence: Synthetic antibody
SHRFSGSKSGITASLTISGLQAEDEADYYCCSYAGSSTVVFGG

SEQ ID NO: 12 - DNA, 129 bp, Artificial Sequence
  Description of Artificial Sequence: Synthetic antibody
tctcatcgcttctctggctccaagtctggcaacacggcctccctgacaatctctgggctccaggctgaggacgagtctgattattactgctgctcatatgcaggtagtagcactgtggtattcggcgga

SEQ ID NO: 13 - protein, 43 aa, Artificial Sequence
  Description of Artificial Sequence: Synthetic antibody
SHRFSGSKSGNTASLTISGLQAEDESDYYCCSYAGSSTVVFGG

SEQ ID NO: 14 - DNA, 129 bp, Artificial Sequence
  Description of Artificial Sequence: Synthetic antibody
tctactcgcttctctggctccaagtctggcaacacggcctccctgacaatctctgtgctccaggctgaggacgaggctgattattactgctgctcatatgcaggtagtagcaccgtggtattcggcgga

SEQ ID NO: 15 - protein, 43 aa, Artificial Sequence
  Description of Artificial Sequence: Synthetic antibody
STRFSGSKSGNTASLTISVLQAEDEADYYCCSYAGSSTVVFGG

SEQ ID NO: 16 - DNA, 129 bp, Artificial Sequence
  Description of Artificial Sequence: Synthetic antibody
tctaatcggttctctggctccaagtctggcaacacgggctccctgacaatctctgggctccaggctgaggacgaggctgattattactgctgctcatatgcaggtagtagcactgtggtattcggcgga

SEQ ID NO: 17 - protein, 43 aa, Artificial Sequence
  Description of Artificial Sequence: Synthetic antibody
SNRFSGSKSGNTGSLTISGLQAEDEADYYCCSYAGSSTVVFGG

SEQ ID NO: 18 - DNA, 129 bp, Artificial Sequence
  Description of Artificial Sequence: Synthetic antibody
tctaatcgcttctcttgctccaagtctggcaacacggcctccctgacaatctctgggctccaggctgatgacgaggctgattattactgctgctcatatgcaggtagtagcaccgtggtattcggcgga

SEQ ID NO: 19 - protein, 43 aa, Artificial Sequence
  Description of Artificial Sequence: Synthetic antibody
SNRFSCSKSGNTASLTISGLQADDEADYYCCSYAGSSTVVFGG

SEQ ID NO: 20 - DNA, 129 bp, Artificial Sequence
  Description of Artificial Sequence: Synthetic antibody
tctaatcgcttctcttgctccaagtctggcaacacggcctccctgacaatctctgggctccaggctgaggacgatgctgattattactgctgctcatatgcaggtagtagcactgtggtattcggcgga

SEQ ID NO: 21 - protein, 43 aa, Artificial Sequence
  Description of Artificial Sequence: Synthetic antibody
SNRFSCSKSGNTASLTISGLQAEDDADYYCCSYAGSSTVVFGG

SEQ ID NO: 22 - DNA, 129 bp, Artificial Sequence
  Description of Artificial Sequence: Synthetic antibody
tctaatcgcttctctgtctccaagtctggcaacacggcctcccttacaatctctgggctccaggctgaggacgaggctgattattactgctgctcatatgcaggtagtagcactgtggtattcggcgga

SEQ ID NO: 23 - protein, 43 aa, Artificial Sequence
  Description of Artificial Sequence: Synthetic antibody
SNRFSVSKSGNTASLTISGLQAEDEADYYCCSYAGSSTVVFGG

SEQ ID NO: 24 - DNA, 129 bp, Artificial Sequence
  Description of Artificial Sequence: Synthetic antibody
tctaatcgcttctctggctcgatgtctggcaacacggcctccctgacaatctctgggctccaggctgaggacgaggctgattattactgctgctcatatgcaggtagtagcactgtggtattcggcgga

SEQ ID NO: 25 - protein, 43 aa, Artificial Sequence
  Description of Artificial Sequence: Synthetic antibody
SNRFSGSMSGNTASLTISGLQAEDEADYYCCSYAGSSTVVFGG

SEQ ID NO: 26 - DNA, 129 bp, Artificial Sequence
  Description of Artificial Sequence: Synthetic antibody
tctaatcgcttctctggctccatgtctggcaacacggcctccctgacattctctgggctccaggctgaggacgaggctgattattactgctgctcatatgcaggtagtagcactgtggtattcggcgga

SEQ ID NO: 27 - protein, 43 aa, Artificial Sequence
  Description of Artificial Sequence: Synthetic antibody
SNRFSGSMSGNTASLTFSGLQAEDEADYYCCSYAGSSTVVFGG

SEQ ID NO: 28 - DNA, 129 bp, Artificial Sequence
  Description of Artificial Sequence: Synthetic antibody
tctaatcgcttctctggctccatgtctggcaacacggcctccctgacaatctctgggctccaggctgaggacgagtctgattattactgctgctcatatgcaggtagtagcactgtggtattcggcgga

SEQ ID NO: 29 - protein, 43 aa, Artificial Sequence
  Description of Artificial Sequence: Synthetic antibody
SNRFSGSMSGNTASLTISGLQAEDESDYYCCSYAGSSTVVFGG

SEQ ID NO: 30 - DNA, 129 bp, Artificial Sequence
  Description of Artificial Sequence: Synthetic antibody
tctaatcgcttctctggctccatgtctggcaacacggcctccctgacaatctctgggctccaggctgaggacgaggctgattattactgctgctcatatgcaggtagtagcactgttgtattcggcgga

SEQ ID NO: 31 - DNA, 129 bp, Artificial Sequence
  Description of Artificial Sequence: Synthetic antibody
tctaatcgcttctctggctccaagtctggctactcggcctccctgacaatctctgggctccaggctgaggacgaggctgattattactgctgctcatatgcaggtagtagcaccgtggtattcggcgga

SEQ ID NO: 32 - protein, 43 aa, Artificial Sequence
  Description of Artificial Sequence: Synthetic antibody
SNRFSGSKSGYSASLTISGLQAEDEADYYCCSYAGSSTVVFGG

SEQ ID NO: 33 - DNA, 129 bp, Artificial Sequence
  Description of Artificial Sequence: Synthetic antibody
tctaatcgcttctctggctccaagtctggctacacggcctccctgactatctctgggctccaggctgaggacgaggctgattattactgctgctcatatgcaggtagtagcactgtggtattcggcgga

SEQ ID NO: 34 - protein, 43 aa, Artificial Sequence
  Description of Artificial Sequence: Synthetic antibody
SNRFSGSKSGYTASLTISGLQAEDEADYYCCSYAGSSTVVFGG

SEQ ID NO: 35 - DNA, 129 bp, Artificial Sequence
  Description of Artificial Sequence: Synthetic antibody
tctaatcgcttctctggctccaagtctggctacacggcctccctgactatctctgggctccaggctgaggacgaggctgattattactgctgctcatatgcaggtagtagcaccgtggtattcggcgga

SEQ ID NO: 36 - DNA, 129 bp, Artificial Sequence
  Description of Artificial Sequence: Synthetic antibody
tctaatcgcttctctggctccaagtctggcatcacggcctccctgactatctctgggctccaggctgaggacgaggctgattattactgctgctcatatgcaggtagtagcactgtggtattcggcgga

SEQ ID NO: 37 - protein, 43 aa, Artificial Sequence
  Description of Artificial Sequence: Synthetic antibody
SNRFSGSKSGITASLTISGLQAEDEADYYCCSYAGSSTVVFGG

SEQ ID NO: 38 - DNA, 129 bp, Artificial Sequence
  Description of Artificial Sequence: Synthetic antibody
tctaatcgcttctctggctccaagtctggcatcacggcctccctgactatctctgggctccaggctgaggacgaggctgattattactgctgctcatatgcaggtagtagcactgtagtattcggcgga

SEQ ID NO: 39 - DNA, 129 bp, Artificial Sequence
  Description of Artificial Sequence: Synthetic antibody
tctaatcgcttctctggctccaagtctggcaactcggcctccctgacaatctctgggctccaggctgatgacgaggctgattattactgctgctcatatgcaggtagtagcaccgtggtattcggcgga

SEQ ID NO: 40 - protein, 43 aa, Artificial Sequence
  Description of Artificial Sequence: Synthetic antibody
SNRFSGSKSGNSASLTISGLQADDEADYYCCSYAGSSTVVFGG

SEQ ID NO: 41 - DNA, 129 bp, Artificial Sequence
  Description of Artificial Sequence: Synthetic antibody
tctaatcgcttctctggctccaagtctggcaacactgcctccctgacaatctcttggctccaggctgaggacgaggctgattattactgctgctcatatgcaggtagtagcactgtagtattcggcgga

SEQ ID NO: 42 - protein, 43 aa, Artificial Sequence
  Description of Artificial Sequence: Synthetic antibody
SNRFSGSKSGNTASLTISWLQAEDEADYYCCSYAGSSTVVFGG

SEQ ID NO: 43 - DNA, 129 bp, Artificial Sequence
  Description of Artificial Sequence: Synthetic antibody
tctaatcgcttctctggctccaagtctggcaacacggcctccctgagaatctctgggctccaggctgaggacgaggctgattattactgctgctcatatgcaggtagtagcactgtggtattcggcggt

SEQ ID NO: 44 - protein, 43 aa, Artificial Sequence
  Description of Artificial Sequence: Synthetic antibody
SNRFSGSKSGNTASLRISGLQAEDEADYYCCSYAGSSTVVFGG

SEQ ID NO: 45 - DNA, 129 bp, Artificial Sequence
  Description of Artificial Sequence: Synthetic antibody
tctaatcgcttctctggctccaagtctggcaacacggcctccctgactatctctgggctccaggctgaggacgaggctgattattactgctgctcatatgcaggtagtagcaccgtggttttcggcgga

SEQ ID NO: 46 - protein, 43 aa, Artificial Sequence
  Description of Artificial Sequence: Synthetic antibody
SNRFSGSKSGNTASLTISGLQAEDEADYYCCSYAGSSTVVFGG

SEQ ID NO: 47 - DNA, 129 bp, Artificial Sequence
  Description of Artificial Sequence: Synthetic antibody
tctaatcgcttctctggctccaagtctggcaacacggcctccctgacgatctctgggctccaggctgaggacgaggctgattattactgctgctcgtatgcaggtagtagcactgtggtattcggcgga

SEQ ID NO: 48 - DNA, 129 bp, Artificial Sequence
  Description of Artificial Sequence: Synthetic antibody
tctaatcgcttctctggctccaagtctggcaacacggcctccctgacaatctctgggctccagtctgaggacgagtctgattattactgctgctcatatgcaggtagtagcactgtggtattcggcgga

SEQ ID NO: 49 - protein, 43 aa, Artificial Sequence
  Description of Artificial Sequence: Synthetic antibody
SNRFSGSKSGNTASLTISGLQSEDESDYYCCSYAGSSTVVFGG

SEQ ID NO: 50 - DNA, 129 bp, Artificial Sequence
  Description of Artificial Sequence: Synthetic antibody
tctaatcgcttctctggctccaagtctggcaacacggcctccctgacaatctctgggctccaggctgaggacgaggctgattattactgctgctcatatgcaggtagtagcactgtggtattcggcgga

SEQ ID NO: 51 - DNA, 129 bp, Artificial Sequence
  Description of Artificial Sequence: Synthetic antibody
tctaatcgcttctctggctccaagtctggcaacacggcctccctgacaatctctgggctccaggctgaggacgaggctgattattactgctgctcatatgcaggtagtagcactgtagtattcggcgga

SEQ ID NO: 52 - DNA, 129 bp, Artificial Sequence
  Description of Artificial Sequence: Synthetic antibody
tctaatcgcttctctggctccaagtctggcaacacggcctccctgacaatctctgggctccaggctgaggacgaggctgattattactgctgctcatatgcaggtagtagcaccgtggtattcggcgga

SEQ ID NO: 53 - DNA, 129 bp, Artificial Sequence
  Description of Artificial Sequence: Synthetic antibody
tctaatcgcttctctgactccaagtctggcaacacggcctccctggcaatctctgggctccaggctgaggacgaggctgattattactgctgctcatatgcaggtagtagcaccgtggtattcggcgga

SEQ ID NO: 54 - protein, 43 aa, Artificial Sequence
  Description of Artificial Sequence: Synthetic antibody
SNRFSDSKSGNTASLAISGLQAEDEADYYCCSYAGSSTVVFGG

SEQ ID NO: 55 - DNA, 129 bp, Artificial Sequence
  Description of Artificial Sequence: Synthetic antibody
gtaattcgcttctctggctccaagtctggcaacacggcctccctgacaatctctgggctccaggctgaggacgaggctgattattactgctgctcatatgcaggtagtagcactgtggtattcggcgga

SEQ ID NO: 56 - protein, 43 aa, Artificial Sequence
  Description of Artificial Sequence: Synthetic antibody
VIRFSGSKSGNTASLTISGLQAEDEADYYCCSYAGSSTVVFGG

SEQ ID NO: 57 - DNA, 129 bp, Artificial Sequence
  Description of Artificial Sequence: Synthetic antibody
cttatccgcttctctggctccaagtctggcaacacggcctccctgacaatctctgggctccaggctgaggacgaggctgattattactgctgctcatatgcaggtagtagcactgtggtattcggcgga

SEQ ID NO: 58 - protein, 43 aa, Artificial Sequence
  Description of Artificial Sequence: Synthetic antibody
LIRFSGSKSGNTASLTISGLQAEDEADYYCCSYAGSSTVVFGG

SEQ ID NO: 59 - DNA, 129 bp, Artificial Sequence
  Description of Artificial Sequence: Synthetic antibody
cttatccgcttctctggctccaagtctggcaacacggcctccctgacaatctctgggctccaggctgaggacgaggctgattattactgctgctcatatgcaggtagtagcaccgtggtattcggcgga

SEQ ID NO: 60 - DNA, 129 bp, Artificial Sequence
  Description of Artificial Sequence: Synthetic antibody
ctaattcgcttctctggctccaagtctggcaacacggcctccctgacaatctctgggctccaggctgaggacgaggctgattattactgctgctcatatgcaggtagtagcactgtggtattcggcgga

SEQ ID NO: 61 - DNA, 129 bp, Artificial Sequence
  Description of Artificial Sequence: Synthetic antibody
ctaatccgcttctctggctccaagtctggcaacacggcctccctgacaatctctgggctccaggctgaggacgaggctgattattactgctgctcatatgcgggtagtagcactgtggtatttggcgga

SEQ ID NO: 62 - DNA, 129 bp, Artificial Sequence
  Description of Artificial Sequence: Synthetic antibody
ctaatccgcttctctggctccaagtctggcaacacggcctccctgacaatctctgggctccaggctgaggacgaggctgattattactgctgctcatatgcaggtagtagcactgtggtattcggcgga

SEQ ID NO: 63 - DNA, 129 bp, Artificial Sequence
  Description of Artificial Sequence: Synthetic antibody
ctaatccgcttctctggctccaagtctggcaacacggcctccctgacaatctctgggctccaggctgaggacgaggctgattattactgctgctcatatgcaggtagtagcactgtagtattcggcgga

SEQ ID NO: 64 - DNA, 129 bp, Artificial Sequence
  Description of Artificial Sequence: Synthetic antibody
ctaatccgcttctctggctccaagtctggcaacacggcctccctgacaatctctgggctccaggctgaggacgaggctgattattactgctgctcatatgcaggtagtagcaccgtggtattcggcgga

SEQ ID NO: 65 - DNA, 129 bp, Artificial Sequence
  Description of Artificial Sequence: Synthetic antibody
ctaatacgcttctctggctccaagtctggcaacacggcctccctgacaatctctgggctccaggctgaggacgaggctgattattactgctgctcatatgcaggtagtagcactgtggtattcggcgga

SEQ ID NO: 66 - DNA, 129 bp, Artificial Sequence
  Description of Artificial Sequence: Synthetic antibody
cctaatcgcttctctggctccaagtctggcaacacggcctccctgacaatctctgggctccaggctgaggacggggctgattattactgctgctcatatgcaggtagtagcactgtggtattcggcgga

SEQ ID NO: 67 - protein, 43 aa, Artificial Sequence
  Description of Artificial Sequence: Synthetic antibody
PNRFSGSKSGNTASLTISGLQAEDGADYYCCSYAGSSTVVFGG

SEQ ID NO: 68 - DNA, 129 bp, Artificial Sequence
  Description of Artificial Sequence: Synthetic antibody
tctaatcgcttctctggctccaagtctggcaacacggcctccctgacaatctctgggctccaggctgaggacgagactgattattactgctgctcatatgcaggtagtagcactgtggtattcggcgga

SEQ ID NO: 69 - protein, 43 aa, Artificial Sequence
  Description of Artificial Sequence: Synthetic antibody
SNRFSGSKSGNTASLTISGLQAEDETDYYCCSYAGSSTVVFGG

SEQ ID NO: 70 - DNA, 129 bp, Artificial Sequence
  Description of Artificial Sequence: Synthetic antibody
gctaatcgcttctctggctccaagtctggcaacacggcctccctgacaatctctgggctccaggctgaggacgaggctgattattactgctgctcatatgcaggtagtagcactgtggtattcggcgga

SEQ ID NO: 71 - protein, 43 aa, Artificial Sequence
  Description of Artificial Sequence: Synthetic antibody
ANRFSGSKSGNTASLTISGLQAEDEADYYCCSYAGSSTVVFGG

SEQ ID NO: 72 - DNA, 129 bp, Artificial Sequence
  Description of Artificial Sequence: Synthetic antibody
tcttatcgcttctctggctccaagtctggcaacacggcctccctgagaatctctgggctccaggctgaggacgaggctgattattactgctgctcatatgcgggtagtagcactgtggtatttggcgga

SEQ ID NO: 73 - protein, 43 aa, Artificial Sequence
  Description of Artificial Sequence: Synthetic antibody
SYRFSGSKSGNTASLRISGLQAEDEADYYCCSYAGSSTVVFGG

SEQ ID NO: 74 - DNA, 129 bp, Artificial Sequence
  Description of Artificial Sequence: Synthetic antibody
tctattcgcttctctggctccaagtctggcaagacggcctccctgacaatctctgggctccaggctgaggacgaggctgattattactgctgctcatatgcgggtagtagcactgtggtatttggcgga

SEQ ID NO: 75 - protein, 43 aa, Artificial Sequence
  Description of Artificial Sequence: Synthetic antibody
SIRFSGSKSGKTASLTISGLQAEDEADYYCCSYAGSSTVVFGG

SEQ ID NO: 76 - DNA, 129 bp, Artificial Sequence
  Description of Artificial Sequence: Synthetic antibody
tctaatcgcttctctggctccttgtctggcaacacggcctccctgacaatctctgggctccaggctgaggacgaggctgattattactgctgctcatatgcgggtagtagcactgtggtatttggcgga

SEQ ID NO: 77 - protein, 43 aa, Artificial Sequence
  Description of Artificial Sequence: Synthetic antibody
SNRFSGSLSGNTASLTISGLQAEDEADYYCCSYAGSSTVVFGG

SEQ ID NO: 78 - DNA, 129 bp, Artificial Sequence
  Description of Artificial Sequence: Synthetic antibody
tctaatcgcttctctggctccaagtctggcaactcggcctccctgagaatctctgggctccaggctgaggacgaggctgattattactgctgctcatatgcgggtagtagcactgtggtatttggcgga

SEQ ID NO: 79 - protein, 43 aa, Artificial Sequence
  Description of Artificial Sequence: Synthetic antibody
SNRFSGSKSGNSASLRISGLQAEDEADYYCCSYAGSSTVVFGG

SEQ ID NO: 80 - DNA, 129 bp, Artificial Sequence
  Description of Artificial Sequence: Synthetic antibody
tctaatcgcttctctggctccaagtctggcaacacggcctccctgacaatctctgggctccaggctgaggacgaggctgattattactgctgctcatatgcgggtagtagcactgtggtatttggcgga

SEQ ID NO: 81 - DNA, 129 bp, Artificial Sequence
  Description of Artificial Sequence: Synthetic antibody
tctaatcgcttctctggctccaagtctggcaacacggcctccccgacaatctctgggctccaggctgaggacgaggctgattattactactgctcatatgcgggtagtagcactgtggtatttggcgga

SEQ ID NO: 82 - protein, 43 aa, Artificial Sequence
  Description of Artificial Sequence: Synthetic antibody
SNRFSGSKSGNTASPTISGLQAEDEADYYYCSYAGSSTVVFGG

SEQ ID NO: 83 - protein, 11 aa, Artificial Sequence
  Description of Artificial Sequence: Synthetic antibody
CSYAGSSTLVF

SEQ ID NO: 84 - DNA, 129 bp, Artificial Sequence
  Description of Artificial Sequence: Synthetic antibody
ttctatcgcttctctggctccaagtctggcaacacggcctccctgacaatctctgggctccaggctgaggacgaggctgattattactgctgctcatatgcaggtagtagcactttggtattcggcgga

SEQ ID NO: 85 - protein, 43 aa, Artificial Sequence
  Description of Artificial Sequence: Synthetic antibody
FYRFSGSKSGNTASLTISGLQAEDEADYYCCSYAGSSTLVFGG

SEQ ID NO: 86 - DNA, 129 bp, Artificial Sequence
  Description of Artificial Sequence: Synthetic antibody
tgtaatcgcttctctggctccaagtctggcaacacggcctccctgacaatctctgtgctccaggctgaggacgaggctgattattactgctgctcatatgcaggtagtagcactttggtattcggcgga

SEQ ID NO: 87 - protein, 43 aa, Artificial Sequence
  Description of Artificial Sequence: Synthetic antibody
CNRFSGSKSGNTASLTISVLQAEDEADYYCCSYAGSSTLVFGG

SEQ ID NO: 88 - DNA, 129 bp, Artificial Sequence
  Description of Artificial Sequence: Synthetic antibody
tgtaatcgcttctctggctccaagtctggcaacacggcctccctgacaatctctgtgctccaggctgaggacgaggctgattattactgctgctcatatgcaggtagtagcactttagtattcggcgga

SEQ ID NO: 89 - DNA, 129 bp, Artificial Sequence
  Description of Artificial Sequence: Synthetic antibody
tcttttcgcttctctggctccaagtctggcaactcggcctccctgacaatctctgggctccaggctgaggacgaggctgattattactgctgctcatatgcaggtagtagcactttggtattcggcgga

SEQ ID NO: 90 - protein, 43 aa, Artificial Sequence
  Description of Artificial Sequence: Synthetic antibody
SFRFSGSKSGNSASLTISGLQAEDEADYYCCSYAGSSTLVFGG

SEQ ID NO: 91 - DNA, 129 bp, Artificial Sequence
  Description of Artificial Sequence: Synthetic antibody
tcttatcgcttctctggctccaagtctggcatcacggcctccctgacaatctctgggctccaggctgaggacgaggctgattattactgctgctcatatgcaggtagtagcactttggtattcggcgga

SEQ ID NO: 92 - protein, 43 aa, Artificial Sequence
  Description of Artificial Sequence: Synthetic antibody
SYRFSGSKSGITASLTISGLQAEDEADYYCCSYAGSSTLVFGG

SEQ ID NO: 93 - DNA, 129 bp, Artificial Sequence
  Description of Artificial Sequence: Synthetic antibody
tctattcgcttctctggctccaagtctggcatcacggcctccctgactatctctgggctccaggctgaggacgaggctgattattactgctgctcatatgcaggtagtagcactttggtattcggcgga

SEQ ID NO: 94 - protein, 43 aa, Artificial Sequence
  Description of Artificial Sequence: Synthetic antibody
SIRFSGSKSGITASLTISGLQAEDEADYYCCSYAGSSTLVFGG

SEQ ID NO: 95 - DNA, 129 bp, Artificial Sequence
  Description of Artificial Sequence: Synthetic antibody
tctattcgcttctctggctccaagtctggcaactcggcctccctgacaatctctgggctccagtctgaggacgaggctgattattactgctgctcatatgcaggtagtagcactttggtattcggcgga

SEQ ID NO: 96 - protein, 43 aa, Artificial Sequence
  Description of Artificial Sequence: Synthetic antibody
SIRFSGSKSGNSASLTISGLQSEDEADYYCCSYAGSSTLVFGG

SEQ ID NO: 97 - DNA, 129 bp, Artificial Sequence
  Description of Artificial Sequence: Synthetic antibody
tctactcgcttctctggctccaagtcttgcaacacggcctccctgacaatctctgggctccaggctgaggacgaggctgattattactgctgctcatatgcaggtagtagcactttggtattcggcgga

SEQ ID NO: 98 - protein, 43 aa, Artificial Sequence
  Description of Artificial Sequence: Synthetic antibody
STRFSGSKSCNTASLTISGLQAEDEADYYCCSYAGSSTLVFGG

SEQ ID NO: 99 - DNA, 129 bp, Artificial Sequence
  Description of Artificial Sequence: Synthetic antibody
tctactcgcttctctggctccaagtctggcaactcggcctccctgacaatctctgggctccaggctgaggacgaggctgattattactgctgctcatatgcaggtagtagcactttggtattcggcgga

SEQ ID NO: 100 - protein, 43 aa, Artificial Sequence
  Description of Artificial Sequence: Synthetic antibody
STRFSGSKSGNSASLTISGLQAEDEADYYCCSYAGSSTLVFGG

SEQ ID NO: 101 - DNA, 129 bp, Artificial Sequence
  Description of Artificial Sequence: Synthetic antibody
tctaatcgcttgtctggctccaagtctggcaacacggcctccctgacaatctctgggctccaggctgaggacgaggatgattattactgctgctcatatgcaggtagtagcactttggtattcggcgga

SEQ ID NO: 102 - protein, 43 aa, Artificial Sequence
  Description of Artificial Sequence: Synthetic antibody
SNRLSGSKSGNTASLTISGLQAEDEDDYYCCSYAGSSTLVFGG

SEQ ID NO: 103 - DNA, 129 bp, Artificial Sequence
  Description of Artificial Sequence: Synthetic antibody
tctaatcgcttctctgtctccaagtctggcaacacggcctccctgactatctctgggctccaggctgaggacgaggctgattattactgctgctcatatgcaggtagtagcactttggtattcggcgga

SEQ ID NO: 104 - protein, 43 aa, Artificial Sequence
  Description of Artificial Sequence: Synthetic antibody
SNRFSVSKSGNTASLTISGLQAEDEADYYCCSYAGSSTLVFGG

SEQ ID NO: 105 - DNA, 129 bp, Artificial Sequence
  Description of Artificial Sequence: Synthetic antibody
tctaatcgcttctctggctcgaagtctggcaacacggcctccctgacaatctctgggctccagtctgaggacgaggctgattattactgctgctcatatgcaggtagtagcactttggtattcggcgga

SEQ ID NO: 106 - protein, 43 aa, Artificial Sequence
  Description of Artificial Sequence: Synthetic antibody
SNRFSGSKSGNTASLTISGLQSEDEADYYCCSYAGSSTLVFGG

SEQ ID NO: 107 - DNA, 129 bp, Artificial Sequence
  Description of Artificial Sequence: Synthetic antibody
tctaatcgcttctctggctcgaagtctggcaacacggactccctgacaatctctgggctccaggctgaggacgaggctgattattactgctgctcatatgcaggtagtagcactttggtattcggcgga

SEQ ID NO: 108 - protein, 43 aa, Artificial Sequence
  Description of Artificial Sequence: Synthetic antibody
SNRFSGSKSGNTDSLTISGLQAEDEADYYCCSYAGSSTLVFGG

SEQ ID NO: 109 - DNA, 129 bp, Artificial Sequence
  Description of Artificial Sequence: Synthetic antibody
tctaatcgcttctctggctccaggtctggcagcacggcctccctgacaatctctgggctccaggctgaggacgaggctgattattactgctgctcatatgcaggtagtagcactttggtattcggcgga

SEQ ID NO: 110 - protein, 43 aa, Artificial Sequence
  Description of Artificial Sequence: Synthetic antibody
SNRFSGSRSGSTASLTISGLQAEDEADYYCCSYAGSSTLVFGG

SEQ ID NO: 111 - DNA, 129 bp, Artificial Sequence
  Description of Artificial Sequence: Synthetic antibody
tctaatcgcttctctggctccaagtctggctacacggcctccctgacaatctcttggctccaggctgaggacgaggctgattattactgctgctcatatgcaggtagtagcactttggtattcggcgga

SEQ ID NO: 112 - protein, 43 aa, Artificial Sequence
  Description of Artificial Sequence: Synthetic antibody
SNRFSGSKSGYTASLTISWLQAEDEADYYCCSYAGSSTLVFGG

SEQ ID NO: 113 - DNA, 129 bp, Artificial Sequence
  Description of Artificial Sequence: Synthetic antibody
tctaatcgcttctctggctccaagtctggcatctcggcctccctgacaatctctgggctccaggctgaggacgaggctgattattactgctgctcatatgcaggtagtagcactttggtattcggcgga

SEQ ID NO: 114 - protein, 43 aa, Artificial Sequence
  Description of Artificial Sequence: Synthetic antibody
SNRFSGSKSGISASLTISGLQAEDEADYYCCSYAGSSTLVFGG

SEQ ID NO: 115 - DNA, 129 bp, Artificial Sequence
  Description of Artificial Sequence: Synthetic antibody
tctaatcgcttctctggctccaagtctggcatcacggcctccctgactatctcttggctccaggctgaggacgaggctgattattactgctgctcatatgcaggtagtagcactttagtattcggcgga

SEQ ID NO: 116 - protein, 43 aa, Artificial Sequence
  Description of Artificial Sequence: Synthetic antibody
SNRFSGSKSGITASLTISWLQAEDEADYYCCSYAGSSTLVFGG

SEQ ID NO: 117 - DNA, 129 bp, Artificial Sequence
  Description of Artificial Sequence: Synthetic antibody
tctaatcgcttctctggctccaagtctggcaactcggcctccctgagaatctctgggctccaggctgaggacgaggctgattattactgctgctcatatgcaggtagtagcactttggtattcggcgga

SEQ ID NO: 118 - protein, 43 aa, Artificial Sequence
  Description of Artificial Sequence: Synthetic antibody
SNRFSGSKSGNSASLRISGLQAEDEADYYCCSYAGSSTLVFGG

SEQ ID NO: 119 - DNA, 129 bp, Artificial Sequence
  Description of Artificial Sequence: Synthetic antibody
tctaatcgcttctctggctccaagtctggcaactcggcctccctgactatctctgggctccaggctgaggacgaggctgattattactgctgctcatatgcaggtagtagcactttagtattcggcgga

SEQ ID NO: 120 - protein, 43 aa, Artificial Sequence
  Description of Artificial Sequence: Synthetic antibody
SNRFSGSKSGNSASLTISGLQAEDEADYYCCSYAGSSTLVFGG

SEQ ID NO: 121 - DNA, 129 bp, Artificial Sequence
  Description of Artificial Sequence: Synthetic antibody
tctaatcgcttctctggctccaagtctggcaacagggcctccctgacattctctgggctccaggctgaggacgaggctgattattactgctgctcatatgcaggtagtagcactttggtattcggcgga

SEQ ID NO: 122 - protein, 43 aa, Artificial Sequence
  Description of Artificial Sequence: Synthetic antibody
SNRFSGSKSGNRASLTFSGLQAEDEADYYCCSYAGSSTLVFGG

SEQ ID NO: 123 - DNA, 129 bp, Artificial Sequence
  Description of Artificial Sequence: Synthetic antibody
tctaatcgcttctctggctccaagtctggcaacacggcgtacctgacaatctctgggctccaggctgaggacgaggctgattattactgctgctcatatgcaggtagtagcactttggtattcggcgga

SEQ ID NO: 124 - protein, 43 aa, Artificial Sequence
  Description of Artificial Sequence: Synthetic antibody
SNRFSGSKSGNTAYLTISGLQAEDEADYYCCSYAGSSTLVFGG

SEQ ID NO: 125 - DNA, 129 bp, Artificial Sequence
  Description of Artificial Sequence: Synthetic antibody
tctaatcgcttctctggctccaagtctggcaacacggcctcgctgacaatctctggtctccaggctgaggacgaggctgattattactgctgctcatatgcaggtagtagcactttggtattcggcgga

SEQ ID NO: 126 - protein, 43 aa, Artificial Sequence
  Description of Artificial Sequence: Synthetic antibody
SNRFSGSKSGNTASLTISGLQAEDEADYYCCSYAGSSTLVFGG

SEQ ID NO: 127 - DNA, 129 bp, Artificial Sequence
  Description of Artificial Sequence: Synthetic antibody
tctaatcgcttctctggctccaagtctggcaacacggcctcgctgacaatctctgggctgcaggctgaggacgaggctgattattactgctgctcatatgcaggtagtagcactttggtattcggcgga

SEQ ID NO: 128 - DNA, 129 bp, Artificial Sequence
  Description of Artificial Sequence: Synthetic antibody
tctaatcgcttctctggctccaagtctggcaacacggcctcccttacaatctctgtgctccaggctgaggacgaggctgattattactgctgctcatatgcaggtagtagcactttggtattcggcgga

SEQ ID NO: 129 - protein, 43 aa, Artificial Sequence
  Description of Artificial Sequence: Synthetic antibody
SNRFSGSKSGNTASLTISVLQAEDEADYYCCSYAGSSTLVFGG

SEQ ID NO: 130 - DNA, 129 bp, Artificial Sequence
  Description of Artificial Sequence: Synthetic antibody
tctaatcgcttctctggctccaagtctggcaacacggcctccctgacaatctcttggctccagtctgaggacgaggctgattattactgctgctcatatgcaggtagtagcactttggtattcggcgga

SEQ ID NO: 131 - protein, 43 aa, Artificial Sequence
  Description of Artificial Sequence: Synthetic antibody
SNRFSGSKSGNTASLTISWLQSEDEADYYCCSYAGSSTLVFGG

SEQ ID NO: 132 - DNA, 129 bp, Artificial Sequence
  Description of Artificial Sequence: Synthetic antibody
tctaatcgcttctctggctccaagtctggcaacacggcctccctgacaatctctgggctccaggctgaggacgaggctgattattactgctgctcatatgcaggtagtagcactttggtattcggcgga

SEQ ID NO: 133 - DNA, 129 bp, Artificial Sequence
  Description of Artificial Sequence: Synthetic antibody
tctaatcgcttctctggctccaagtctggcaacacggcctccctgacaatctctgggctccaggctgaggacgaggctgattattactgctgctcatatgcaggtagtagcactttagtattcggcgga

SEQ ID NO: 134 - DNA, 129 bp, Artificial Sequence
  Description of Artificial Sequence: Synthetic antibody
tctaatcgcttctctggctccaagtctggcaacacggcctccctgacaatctctgggctccaggctgaggacgaggctgattattactgctgctcatatgcaggtagtagcactctggtattcggcgga

SEQ ID NO: 135 - DNA, 129 bp, Artificial Sequence
  Description of Artificial Sequence: Synthetic antibody
tctaatcgcttctctggctccaagtctggcaacacggccgccctgacactctctgggctccaggctgaggacgaggctgattattactgctgctcatatgcaggtagtagcactttggtattcggcgga

SEQ ID NO: 136 - protein, 43 aa, Artificial Sequence
  Description of Artificial Sequence: Synthetic antibody
SNRFSGSKSGNTAALTLSGLQAEDEADYYCCSYAGSSTLVFGG

SEQ ID NO: 137 - DNA, 129 bp, Artificial Sequence
  Description of Artificial Sequence: Synthetic antibody
tctaatcgcatctctggctccaagtcaggcaacacggcctccctgacaatctctgggctccaggctgaggacgaggctgattattactgctgctcatatgcaggtagtagcactttggtattcggcgga

SEQ ID NO: 138 - protein, 43 aa, Artificial Sequence
  Description of Artificial Sequence: Synthetic antibody
SNRISGSKSGNTASLTISGLQAEDEADYYCCSYAGSSTLVFGG

SEQ ID NO: 139 - DNA, 129 bp, Artificial Sequence
  Description of Artificial Sequence: Synthetic antibody
tcaattcgcttctctggctccaagtctggcaacacggcctccccgacaatctctgggctccaggctgaggacgaggctgattattactgctgctcatatgcaggtagtagcactttggtattcggcgga

SEQ ID NO: 140 - protein, 43 aa, Artificial Sequence
  Description of Artificial Sequence: Synthetic antibody
SIRFSGSKSGNTASPTISGLQAEDEADYYCCSYAGSSTLVFGG

SEQ ID NO: 141 - DNA, 129 bp, Artificial Sequence
  Description of Artificial Sequence: Synthetic antibody
gtaattcgcttctctggctccaagtctggcaacacggcctccctgacaatctctgggctccaggctgaggacgaggctgattattactgctgctcatatgcaggtagtagcactttggtattcggcgga

SEQ ID NO: 142 - protein, 43 aa, Artificial Sequence
  Description of Artificial Sequence: Synthetic antibody
VIRFSGSKSGNTASLTISGLQAEDEADYYCCSYAGSSTLVFGG

SEQ ID NO: 143 - DNA, 129 bp, Artificial Sequence
  Description of Artificial Sequence: Synthetic antibody
gctaatcgctgctctggctccaagtctggcaacacggcctccctgacaatctctgggctccaggctgaggacgaggctgattattactgctgctcatatgcaggtagtagcactttggtattcggcgga

SEQ ID NO: 144 - protein, 43 aa, Artificial Sequence
  Description of Artificial Sequence: Synthetic antibody
ANRCSGSKSGNTASLTISGLQAEDEADYYCCSYAGSSTLVFGG

SEQ ID NO: 145 - DNA, 129 bp, Artificial Sequence
  Description of Artificial Sequence: Synthetic antibody
cttattcgcttctctggctccaagtctggcaacacggcctccctgacaatctctgggctccaggctgaggacgaggctgattattactgctgctcatatgcaggtagtagcactttggtattcggcgga

SEQ ID NO: 146 - protein, 43 aa, Artificial Sequence
  Description of Artificial Sequence: Synthetic antibody
LIRFSGSKSGNTASLTISGLQAEDEADYYCCSYAGSSTLVFGG

SEQ ID NO: 147 - DNA, 129 bp, Artificial Sequence
  Description of Artificial Sequence: Synthetic antibody
cttatccgcttctctggctccaagtctggcaacacggcctccctgacaatctctgggctccaggctgaggacgaggctgattattactgctgctcatatgcaggtagtagcactttggtattcggcgga

SEQ ID NO: 148 - DNA, 129 bp, Artificial Sequence
  Description of Artificial Sequence: Synthetic antibody
ctaatccgcttctctggctccaagtctggcaacacggcctccctgacaatctctgggctccaggctgaggacgaggctgattattactgctgctcatatgcaggtagtagcactttggtattcggcgga

SEQ ID NO: 149 - DNA, 129 bp, Artificial Sequence
  Description of Artificial Sequence: Synthetic antibody
ctaatccgcttctctggctccaagtctggcaacacggcctccctgacaatctctgggctccaggctgaggacgaggctgattattactgctgctcatatgcaggtagtagcactttagtattcggcgga

SEQ ID NO: 150 - DNA, 129 bp, Artificial Sequence
  Description of Artificial Sequence: Synthetic antibody
ctaatccgcttctctggctccaagtctggcaacacggcctccctgacaatctctgggctccaggctgaggacgaggctgattattactgctgctcatatgcaggtagtagcactctggtattcggcgga

SEQ ID NO: 151 - DNA, 129 bp, Artificial Sequence
  Description of Artificial Sequence: Synthetic antibody
tttctaatcgcttctggctccaagtctggcaacacggcctccctgacaatctctgggctccaggctgaggacgaggctgattattactgctgctcatatgcaggtagtagcactttagtattcggcgga

SEQ ID NO: 152 - protein, 43 aa, Artificial Sequence
  Description of Artificial Sequence: Synthetic antibody
FLIASGSKSGNTASLTISGLQAEDEADYYCCSYAGSSTLVFGG

SEQ ID NO: 153 - protein, 11 aa, Artificial Sequence
  Description of Artificial Sequence: Synthetic antibody
CSYAGSSTYVF

SEQ ID NO: 154 - DNA, 129 bp, Artificial Sequence
  Description of Artificial Sequence: Synthetic antibody
ttctatcgcttctctggctccaagtctggcaacacggcctccctgacaatctctgggctccaggctgaggacgaggctgattattactgctgctcatatgcaggtagtagcacttatgtcttcggaact

SEQ ID NO: 155 - protein, 43 aa, Artificial Sequence
  Description of Artificial Sequence: Synthetic antibody
FYRFSGSKSGNTASLTISGLQAEDEADYYCCSYAGSSTYVFGT

SEQ ID NO: 156 - DNA, 129 bp, Artificial Sequence
  Description of Artificial Sequence: Synthetic antibody
tctcatcgcttctctggctccaagtctggcaacacggcctccctgacaatctctggtgtccaggctgaggacgaggctgattattactgctgctcatatgcaggtagtagcacttatgtcttcggaact

SEQ ID NO: 157 - protein, 43 aa, Artificial Sequence
  Description of Artificial Sequence: Synthetic antibody
SHRFSGSKSGNTASLTISGVQAEDEADYYCCSYAGSSTYVFGT

SEQ ID NO: 158 - DNA, 129 bp, Artificial Sequence
  Description of Artificial Sequence: Synthetic antibody
tctattcgcttctctggcttcaagtctggcaacacggcctccctgacaatctctgggctccaggctgaggacgaggctgattattacagctgctcatatgcaggtagtagcacttatgtcttcagaact

SEQ ID NO: 159 - protein, 43 aa, Artificial Sequence
  Description of Artificial Sequence: Synthetic antibody
SIRFSGFKSGNTASLTISGLQAEDEADYYSCSYAGSSTYVFRT

SEQ ID NO: 160 - DNA, 129 bp, Artificial Sequence
  Description of Artificial Sequence: Synthetic antibody
tctattcgcttctctggctcgaagtctggcaagacggcctccctgacaatctctgggctccaggctgaggacgaggctgattattactgctgctcatatgcaggtagtagcacttatgtcttcggaact

SEQ ID NO: 161 - protein, 43 aa, Artificial Sequence
  Description of Artificial Sequence: Synthetic antibody
SIRFSGSKSGKTASLTISGLQAEDEADYYCCSYAGSSTYVFGT

SEQ ID NO: 162 - DNA, 129 bp, Artificial Sequence
  Description of Artificial Sequence: Synthetic antibody
tctattcgcttctctggctcctggtctggcaacacggcctccctgacaatctctgggctccaggctgaggacgaggctgattattactgctgctcatatgcaggtagtagcacttatgtcttcggaact

SEQ ID NO: 163 - protein, 43 aa, Artificial Sequence
  Description of Artificial Sequence: Synthetic antibody
SIRFSGSWSGNTASLTISGLQAEDEADYYCCSYAGSSTYVFGT

SEQ ID NO: 164 - DNA, 129 bp, Artificial Sequence
  Description of Artificial Sequence: Synthetic antibody
tctattcgcttctctggctccatgtctggcaacacggcctccctgacaatctcttggctccaggctgaggacgagtctgattattactgctgctcatatgcaggtagtagcacttatgtcttcggaact

SEQ ID NO: 165 - protein, 43 aa, Artificial Sequence
  Description of Artificial Sequence: Synthetic antibody
SIRFSGSMSGNTASLTISWLQAEDESDYYCCSYAGSSTYVFGT

SEQ ID NO: 166 - DNA, 129 bp, Artificial Sequence
  Description of Artificial Sequence: Synthetic antibody
tctattcgcttctctggctccaagtctggcatcacggcatccctgacaatctctgggctccaggctgaggacgaggctgattattactgctgctcatatgcaggtagtagcacttatgtcttcggaact

SEQ ID NO: 167 - protein, 43 aa, Artificial Sequence
  Description of Artificial Sequence: Synthetic antibody
SIRFSGSKSGITASLTISGLQAEDEADYYCCSYAGSSTYVFGT

SEQ ID NO: 168 - DNA, 129 bp, Artificial Sequence
  Description of Artificial Sequence: Synthetic antibody
tctattcgcttctctggctccaagtctggcaacacggcctccctgtcaatctctgggctcctggctgaggacgaggctgattattactgctgctcatatgcaggtagtagcacttatgtcttcggaact

SEQ ID NO: 169 - protein, 43 aa, Artificial Sequence
  Description of Artificial Sequence: Synthetic antibody
SIRFSGSKSGNTASLSISGLLAEDEADYYCCSYAGSSTYVFGT

SEQ ID NO: 170 - DNA, 129 bp, Artificial Sequence
  Description of Artificial Sequence: Synthetic antibody
tctaatcgcttctctggctgcaagtctggcatcacggcctccctgacaatctctgggctccaggctgaggacgaggctgattattactgctgctcatatgcaggtagtagcacttatgtcttcggaact

SEQ ID NO: 171 - protein, 43 aa, Artificial Sequence
  Description of Artificial Sequence: Synthetic antibody
SNRFSGCKSGITASLTISGLQAEDEADYYCCSYAGSSTYVFGT

SEQ ID NO: 172 - DNA, 129 bp, Artificial Sequence
  Description of Artificial Sequence: Synthetic antibody
tctaatcgcttctctggctccaagtcttgcatcacggcctccctgagaatctctgggctccaggctgaggacgaggctgattattactgctgctcatatgcaggtagtagcacttatgtcttcggaact

SEQ ID NO: 173 - protein, 43 aa, Artificial Sequence
  Description of Artificial Sequence: Synthetic antibody
SNRFSGSKSCITASLRISGLQAEDEADYYCCSYAGSSTYVFGT

SEQ ID NO: 174 - DNA, 129 bp, Artificial Sequence
  Description of Artificial Sequence: Synthetic antibody
tctaatcgcttctctggctccaagtctggcatcacggcctccctgacaatctctgggctccaggctgaggacgaggctgattattactgctgctcatatgcaggtagtagcacttatgtcttcggtact

SEQ ID NO: 175 - protein, 43 aa, Artificial Sequence
  Description of Artificial Sequence: Synthetic antibody
SNRFSGSKSGITASLTISGLQAEDEADYYCCSYAGSSTYVFGT

SEQ ID NO: 176 - DNA, 129 bp, Artificial Sequence
  Description of Artificial Sequence: Synthetic antibody
tctaatcgcttctctggctccaagtctggcaagtcggcctccctgagaatctctgggctccaggctgaggacgaggctgattattactgctgctcatatgcaggtagtagcacttatgtcttcggaact

SEQ ID NO: 177 - protein, 43 aa, Artificial Sequence
  Description of Artificial Sequence: Synthetic antibody
SNRFSGSKSGKSASLRISGLQAEDEADYYCCSYAGSSTYVFGT

SEQ ID NO: 178 - DNA, 129 bp, Artificial Sequence
  Description of Artificial Sequence: Synthetic antibody
tctaatcgcttctctggctccaagtctggcaactcgggctccctgacaatctctgggctccaggctgaggacgagtctgattattactgctgctcatatgcaggtagtagcacttatgtcttcggaact

SEQ ID NO: 179 - protein, 43 aa, Artificial Sequence
  Description of Artificial Sequence: Synthetic antibody
SNRFSGSKSGNSGSLTISGLQAEDESDYYCCSYAGSSTYVFGT

SEQ ID NO: 180 - DNA, 129 bp, Artificial Sequence
  Description of Artificial Sequence: Synthetic antibody
tctaatcgcttctctggctccaagtctggcaacagggcctgcctgacaatctctgggctccaggctgaggacgaggctgattattactgctgctcatatgcaggtagtagcacttatgtcttcggaact

SEQ ID NO: 181 - protein, 43 aa, Artificial Sequence
  Description of Artificial Sequence: Synthetic antibody
SNRFSGSKSGNRACLTISGLQAEDEADYYCCSYAGSSTYVFGT

SEQ ID NO: 182 - DNA, 129 bp, Artificial Sequence
  Description of Artificial Sequence: Synthetic antibody
tctaatcgcttctctggctccaagtctggcaacacggcctccctgacactctctgggctccaggctgaggacgaggctgattattactgctgctcatatgcaggtagtagcacttatgtcttcggaact

SEQ ID NO: 183 - protein, 43 aa, Artificial Sequence
  Description of Artificial Sequence: Synthetic antibody
SNRFSGSKSGNTASLTLSGLQAEDEADYYCCSYAGSSTYVFGT

SEQ ID NO: 184 - DNA, 129 bp, Artificial Sequence
  Description of Artificial Sequence: Synthetic antibody
tctaatcgcttctctggctccaagtctggcaacacggcctccctgacaatctctggtctccaggctgaggacgagtctgattattactgctgctcatatgcaggtagtagcacttatgtcttcggaact

SEQ ID NO: 185 - protein, 43 aa, Artificial Sequence
  Description of Artificial Sequence: Synthetic antibody
SNRFSGSKSGNTASLTISGLQAEDESDYYCCSYAGSSTYVFGT

SEQ ID NO: 186 - DNA, 129 bp, Artificial Sequence
  Description of Artificial Sequence: Synthetic antibody
tctaatcgcttctctggctccaagtctggcaacacggcctccctgacaatctctggggtccaggctgaggacgaggctgattattactgctgctcatatgcaggtagtagcacttatgtcttcggaact

SEQ ID NO: 187 - protein, 43 aa, Artificial Sequence
  Description of Artificial Sequence: Synthetic antibody
SNRFSGSKSGNTASLTISGVQAEDEADYYCCSYAGSSTYVFGT

SEQ ID NO: 188 - DNA, 129 bp, Artificial Sequence
  Description of Artificial Sequence: Synthetic antibody
tctaatcgcttctctggctccaagtctggcaacacggcctccctgacaatctctgggctcccggctgaggacgcggctgattattactgctgctcatatgcaggtagtagcacttatgtcttcggaact

SEQ ID NO: 189 - protein, 43 aa, Artificial Sequence
  Description of Artificial Sequence: Synthetic antibody
SNRFSGSKSGNTASLTISGLPAEDAADYYCCSYAGSSTYVFGT

SEQ ID NO: 190 - DNA, 129 bp, Artificial Sequence
  Description of Artificial Sequence: Synthetic antibody
tctaatcgcttctctggctccaagtctggcaacacggcctccctgacaatctctgggctccaggctgatgacgaggctgattattactgctgctcatatgcaggtagtagcacttatgtcttcggatct

SEQ ID NO: 191 - protein, 43 aa, Artificial Sequence
  Description of Artificial Sequence: Synthetic antibody
SNRFSGSKSGNTASLTISGLQADDEADYYCCSYAGSSTYVFGS

SEQ ID NO: 192 - DNA, 129 bp, Artificial Sequence
  Description of Artificial Sequence: Synthetic antibody
tctaatcgcttctctggctccaagtctggcaacacggcctccctgacaatctctgggctccaggctgaggacgagtctgattattactgctgctcatatgcaggtagtagcacttatgtcttcggaact

SEQ ID NO: 193 - DNA, 129 bp, Artificial Sequence
  Description of Artificial Sequence: Synthetic antibody
tctaatcgcttctctggctccaagtctggcaacacggcctccctgacaatctctgggctccaggctgaggacgaggctgattattactgctgctcatatgcaggtagtagcacttatgtcttcggaact

SEQ ID NO: 194 - protein, 43 aa, Artificial Sequence
  Description of Artificial Sequence: Synthetic antibody
SNRFSGSKSGNTASLTISGLQAEDEADYYCCSYAGSSTYVFGT

SEQ ID NO: 195 - DNA, 129 bp, Artificial Sequence
  Description of Artificial Sequence: Synthetic antibody
tctaatcgcttctctggctccaagtctggcaacacggcctccctgacaatctctggcctccaggctgaggacgaggctgattattactgctgctcatatgcaggtagtagtacttatgtcttcggaact

SEQ ID NO: 196 - DNA, 129 bp, Artificial Sequence
  Description of Artificial Sequence: Synthetic antibody
tctaatcgcttctctggctccaagtctggcaacacggcatccctgacaatctctgggctccagtctgaggacgaggctgattattactgctgctcatatgcaggtagtagcacttatgtcttcggaact

SEQ ID NO: 197 - protein, 43 aa, Artificial Sequence
  Description of Artificial Sequence: Synthetic antibody
SNRFSGSKSGNTASLTISGLQSEDEADYYCCSYAGSSTYVFGT

SEQ ID NO: 198 - DNA, 129 bp, Artificial Sequence
  Description of Artificial Sequence: Synthetic antibody
tctaatcgcttctctggctccaagtctggcaacaaggcctccctgacaatctctgggctccagtctgaggacgaggctgattattactgctgctcatatgcaggtagtagcacttatgtcttcggaact

SEQ ID NO: 199 - protein, 43 aa, Artificial Sequence
  Description of Artificial Sequence: Synthetic antibody
SNRFSGSKSGNKASLTISGLQSEDEADYYCCSYAGSSTYVFGT

SEQ ID NO: 200 - DNA, 129 bp, Artificial Sequence
  Description of Artificial Sequence: Synthetic antibody
gtaatacgcttctctggctccaagtctggcaacacggcctccctgacaatctctgggctccaggctgaggacgaggctgattattactgctgctcatatgcaggtagtagcacttatgtcttcggaact

SEQ ID NO: 201 - protein, 43 aa, Artificial Sequence
  Description of Artificial Sequence: Synthetic antibody
VIRFSGSKSGNTASLTISGLQAEDEADYYCCSYAGSSTYVFGT

SEQ ID NO: 202 - DNA, 129 bp, Artificial Sequence
  Description of Artificial Sequence: Synthetic antibody
gcaattcgcttctctggctccaagtctggcaacacggcctccctgacaatctctgggctccaggctgaggacgaggctgattattactgctgctcatatgcaggtagtagcacttatgtcttcggaact

SEQ ID NO: 203 - protein, 43 aa, Artificial Sequence
  Description of Artificial Sequence: Synthetic antibody
AIRFSGSKSGNTASLTISGLQAEDEADYYCCSYAGSSTYVFGT

SEQ ID NO: 204 - DNA, 129 bp, Artificial Sequence
  Description of Artificial Sequence: Synthetic antibody
cttattcgcttctctggctccaagtctggcaacacggcctccctgacaatctctgggctccaggctgaggacgaggctgattattactgctgctcatatgcaggtagtagcacttatgtcttcggaact

SEQ ID NO: 205 - protein, 43 aa, Artificial Sequence
  Description of Artificial Sequence: Synthetic antibody
LIRFSGSKSGNTASLTISGLQAEDEADYYCCSYAGSSTYVFGT

SEQ ID NO: 206 - DNA, 129 bp, Artificial Sequence
  Description of Artificial Sequence: Synthetic antibody
cttatccgcttctctggctccaagtctggcaacacggcctccctgacaatctctgggctccaggctgaggacgaggctgattattactgctgctcatatgcaggtagtagcacttatgtcttcggaact

SEQ ID NO: 207 - DNA, 129 bp, Artificial Sequence
  Description of Artificial Sequence: Synthetic antibody
ctaatccgcttctctggctccaagtctggcaacacggcctccctgacaatctctgggctccaggctgaggacgagtctgattattactgctgctcatatgcaggtagtagcacttatgtcttcggaact

SEQ ID NO: 208 - protein, 43 aa, Artificial Sequence
  Description of Artificial Sequence: Synthetic antibody
LIRFSGSKSGNTASLTISGLQAEDESDYYCCSYAGSSTYVFGT

SEQ ID NO: 209 - DNA, 129 bp, Artificial Sequence
  Description of Artificial Sequence: Synthetic antibody
ctaatccgcttctctggctccaagtctggcaacacggcctccctgacaatctctgggctccaggctgaggacgaggctgattattactgctgctcatatgcaggtagtagcacttatgtcttcggaact

SEQ ID NO: 210 - DNA, 129 bp, Artificial Sequence
  Description of Artificial Sequence: Synthetic antibody
ctaatccgcttctctggctccaagtctggcaacacggcctccctgacaatctctggcctccaggctgaggacgaggctgattattactgctgctcatatgcaggtagtagtacttatgtcttcggaact

SEQ ID NO: 211 - DNA, 129 bp, Artificial Sequence
  Description of Artificial Sequence: Synthetic antibody
ctaatacgcttctctggctccaagtctggcaacacggcctccctgacaatctctgggctccaggctgaggacgaggctgattattactgctgctcatatgcaggtagtagcacttatgtcttcggaact

SEQ ID NO: 212 - DNA, 129 bp, Artificial Sequence
  Description of Artificial Sequence: Synthetic antibody
tctaatcgcttctctggctccaagtctgggaacacggcctccctgacaatctctgggctccaggctgaggacgaggctgattattactgctgctcatatgcaggtagtagcacttatgtcttcggaact

SEQ ID NO: 213 - protein, 11 aa, Artificial Sequence
  Description of Artificial Sequence: Synthetic antibody
CSYAGSYTYVF

SEQ ID NO: 214 - DNA, 129 bp, Artificial Sequence
  Description of Artificial Sequence: Synthetic antibody
ctgatccgcttctctggctccaagtctggcaacacggcctccctgaccttctctgggctccaggctgaggatgaggctgattattactgctgctcatatgcaggcagttacacttatgtcttcggaact

SEQ ID NO: 215 - protein, 43 aa, Artificial Sequence
  Description of Artificial Sequence: Synthetic antibody
LIRFSGSKSGNTASLTFSGLQAEDEADYYCCSYAGSYTYVFGT

SEQ ID NO: 216 - DNA, 129 bp, Artificial Sequence
  Description of Artificial Sequence: Synthetic antibody
ctgatccgcttctctggctccaagtctggcaacacggcctccctgaccatctctgggctccaggctgaggatgaggctgattattactgctgctcatatgcaggcagctacacttatgtcttcggaact

SEQ ID NO: 217 - protein, 43 aa, Artificial Sequence
  Description of Artificial Sequence: Synthetic antibody
LIRFSGSKSGNTASLTISGLQAEDEADYYCCSYAGSYTYVFGT

SEQ ID NO: 218 - DNA, 129 bp, Artificial Sequence
  Description of Artificial Sequence: Synthetic antibody
ctgatacgcttctctggctccaagtctggcaacacggcctccctgaccatctctgggctccaggctgaggatgaggctgattattactgctgctcatatgcaggcagctacacttatgtcttcggaact

SEQ ID NO: 219 - DNA, 129 bp, Artificial Sequence
  Description of Artificial Sequence: Synthetic antibody
cgtgatcgcttctctggctccaagtctggcaacacggcctccctgtccatctctgggctccaggctgaggatgaggctgattattactgctgctcatatgcaggcagctacacttatgtcttcggaact

SEQ ID NO: 220 - protein, 43 aa, Artificial Sequence
  Description of Artificial Sequence: Synthetic antibody
RDRFSGSKSGNTASLSISGLQAEDEADYYCCSYAGSYTYVFGT

SEQ ID NO: 221 - DNA, 129 bp, Artificial Sequence
  Description of Artificial Sequence: Synthetic antibody
cgtgatcgcttctctggctccaagtctggcaacacggcctccctgagcatctctgggctccaggctgaggatgaggctgattattactgctgctcatatgcaggcagctacacttatgtcttcggaact

SEQ ID NO: 222 - DNA, 129 bp, Artificial Sequence
  Description of Artificial Sequence: Synthetic antibody
cctgatggcttctctggctccaagtctggcaagacggcctccctgaccatctctgggctccaggctgaggatgaggctgattattactgctgctcatatgcaggcagctacacttatgtcttcggaact

SEQ ID NO: 223 - protein, 43 aa, Artificial Sequence
  Description of Artificial Sequence: Synthetic antibody
PDGFSGSKSGKTASLTISGLQAEDEADYYCCSYAGSYTYVFGT

SEQ ID NO: 224 - DNA, 129 bp, Artificial Sequence
  Description of Artificial Sequence: Synthetic antibody
cctgatcggttctctggctccaagtctggcatctcggcctccctgaccatctctgggctccaggctgaggatgaggctgattattactgctgctcatatgcaggcagctacacttatgtcttcggaact

SEQ ID NO: 225 - protein, 43 aa, Artificial Sequence
  Description of Artificial Sequence: Synthetic antibody
PDRFSGSKSGISASLTISGLQAEDEADYYCCSYAGSYTYVFGT

SEQ ID NO: 226 - DNA, 129 bp, Artificial Sequence
  Description of Artificial Sequence: Synthetic antibody
cctgatcgcttctctggctcgaagtctggcatctcggcctccctgaccatctctgggctccaggctgaggatgaggctgattattactgctgctcatatgcaggcagctacacttatgtcttcggaact

SEQ ID NO: 227 - DNA, 129 bp, Artificial Sequence
  Description of Artificial Sequence: Synthetic antibody
cctgatcgcttctctggctcgaagtctggcaactcggcctccctgaccttctctgggctccaggctgaggatgaggctgattattactgctgctcatatgcaggcagttacacttatgtcttcggaact

SEQ ID NO: 228 - protein, 43 aa, Artificial Sequence
  Description of Artificial Sequence: Synthetic antibody
PDRFSGSKSGNSASLTFSGLQAEDEADYYCCSYAGSYTYVFGT

SEQ ID NO: 229 - DNA, 129 bp, Artificial Sequence
  Description of Artificial Sequence: Synthetic antibody
cctgatcgcttctctggctcgaagtctggcaacacggcctccctgaccttctctgggctccaggctgaggatgagtctgattattactgctgctcatatgcaggcagttacacttatgtcttcggaact

SEQ ID NO: 230 - protein, 43 aa, Artificial Sequence
  Description of Artificial Sequence: Synthetic antibody
PDRFSGSKSGNTASLTFSGLQAEDESDYYCCSYAGSYTYVFGT

SEQ ID NO: 231 - DNA, 129 bp, Artificial Sequence
  Description of Artificial Sequence: Synthetic antibody
cctgatcgcttctctggctccatgtctggcaacacggcctccctgaccatctctgggctcctggctgaggatgaggctgattattactgctgctcatatgcaggcagctacacttatgtcttcggaact

SEQ ID NO: 232 - protein, 43 aa, Artificial Sequence
  Description of Artificial Sequence: Synthetic antibody
PDRFSGSMSGNTASLTISGLLAEDEADYYCCSYAGSYTYVFGT

SEQ ID NO: 233 - DNA, 129 bp, Artificial Sequence
  Description of Artificial Sequence: Synthetic antibody
cctgatcgcttctctggctccatgtctggcaacacggcctccctgaccatctctgggctccaggctgaggatgaggatgattattactgctgctcatatgcaggcagctacacttatgtcttcggaact

SEQ ID NO: 234 - protein, 43 aa, Artificial Sequence
  Description of Artificial Sequence: Synthetic antibody
PDRFSGSMSGNTASLTISGLQAEDEDDYYCCSYAGSYTYVFGT

SEQ ID NO: 235 - DNA, 129 bp, Artificial Sequence
  Description of Artificial Sequence: Synthetic antibody
cctgatcgcttctctggctccaagtcttgcaacacggcctccctgaccatctctgggctccaggctgatgatgaggctgattattactgctgctcatatgcaggcagctacacttatgtcttcggaact

SEQ ID NO: 236 - protein, 43 aa, Artificial Sequence
  Description of Artificial Sequence: Synthetic antibody
PDRFSGSKSCNTASLTISGLQADDEADYYCCSYAGSYTYVFGT

SEQ ID NO: 237 - DNA, 129 bp, Artificial Sequence
  Description of Artificial Sequence: Synthetic antibody
cctgatcgcttctctggctccaagtctggctacacggcctccctgaccttctcttggctccaggctgaggatgaggctgattattactgctgctcatatgcaggcagttacacttatgtcttcggaact

SEQ ID NO: 238 - protein, 43 aa, Artificial Sequence
  Description of Artificial Sequence: Synthetic antibody
PDRFSGSKSGYTASLTFSWLQAEDEADYYCCSYAGSYTYVFGT

SEQ ID NO: 239 - DNA, 129 bp, Artificial Sequence
  Description of Artificial Sequence: Synthetic antibody
cctgatcgcttctctggctccaagtctggcatcacggcctccctgacgatctctgggctccaggctgaggatgaggctgattattactgctgctcatatgcaggcagctacacttacgtcttcggaact

SEQ ID NO: 240 - protein, 43 aa, Artificial Sequence
  Description of Artificial Sequence: Synthetic antibody
PDRFSGSKSGITASLTISGLQAEDEADYYCCSYAGSYTYVFGT

SEQ ID NO: 241 - DNA, 129 bp, Artificial Sequence
  Description of Artificial Sequence: Synthetic antibody
cctgatcgcttctctggctccaagtctggcaactcggcctccctgagcatctctgggctccaggctgaggatgaggctgattattactgctgctcatatgcaggcagctacacttatgtcttcggaact

SEQ ID NO: 242 - protein, 43 aa, Artificial Sequence
  Description of Artificial Sequence: Synthetic antibody
PDRFSGSKSGNSASLSISGLQAEDEADYYCCSYAGSYTYVFGT

SEQ ID NO: 243 - DNA, 129 bp, Artificial Sequence
  Description of Artificial Sequence: Synthetic antibody
cctgatcgcttctctggctccaagtctggcaacacgtcctccctgaccatctctgggctcgaggctgaggatgaggctgattattactgctgctcatatgcaggcagctacacttatgtcttcggaact

SEQ ID NO: 244 - protein, 43 aa, Artificial Sequence
  Description of Artificial Sequence: Synthetic antibody
PDRFSGSKSGNTSSLTISGLEAEDEADYYCCSYAGSYTYVFGT

SEQ ID NO: 245 - DNA, 129 bp, Artificial Sequence
  Description of Artificial Sequence: Synthetic antibody
cctgatcgcttctctggctccaagtctggcaacacggcctccctgaccttctctgggctccaggctgaggatgaggctgattattactgctgctcatatgcaggcagttacacttatgtcttcggaact

SEQ ID NO: 246 - protein, 43 aa, Artificial Sequence
  Description of Artificial Sequence: Synthetic antibody
PDRFSGSKSGNTASLTFSGLQAEDEADYYCCSYAGSYTYVFGT

SEQ ID NO: 247 - DNA, 129 bp, Artificial Sequence
  Description of Artificial Sequence: Synthetic antibody
cctgatcgcttctctggctccaagtctggcaacacggcctccctgaccatctctgggctcgaggctgaggatgaggctgattattactgctgctcatatgcaggcagctacacttatgtcttcggatct

SEQ ID NO: 248 - protein, 43 aa, Artificial Sequence
  Description of Artificial Sequence: Synthetic antibody
PDRFSGSKSGNTASLTISGLEAEDEADYYCCSYAGSYTYVFGS

SEQ ID NO: 249 - DNA, 129 bp, Artificial Sequence
  Description of Artificial Sequence: Synthetic antibody
cctgatcgcttctctggctccaagtctggcaacacggcctccctgaccatctctgggctccaggctgagtatgaggctgattattactcctgctcatatgcaggcagctacacttatgtcttcggaact

SEQ ID NO: 250 - protein, 43 aa, Artificial Sequence
  Description of Artificial Sequence: Synthetic antibody
PDRFSGSKSGNTASLTISGLQAEYEADYYSCSYAGSYTYVFGT

SEQ ID NO: 251 - DNA, 129 bp, Artificial Sequence
  Description of Artificial Sequence: Synthetic antibody
cctgatcgcttctctggctccaagtctggcaacacggcctccctgaccatctctgggctccaggctgaggatgaggctgattattactgctgctcatatgcaggcagctacacttatgtcttcggaact

SEQ ID NO: 252 - protein, 43 aa, Artificial Sequence
  Description of Artificial Sequence: Synthetic antibody
PDRFSGSKSGNTASLTISGLQAEDEADYYCCSYAGSYTYVFGT

SEQ ID NO: 253 - DNA, 129 bp, Artificial Sequence
  Description of Artificial Sequence: Synthetic antibody
cctgatcgcttctctggctccaagtctggcaacacggcctccctgaccatctctgggctccaggctgaggatgaggctgattattactgctgctcatatgcaggcagctacacttacgtcttcggaact

SEQ ID NO: 254 - DNA, 129 bp, Artificial Sequence
  Description of Artificial Sequence: Synthetic antibody
cctgatcgcttctctggctccaagtctggcaacacggcctccctgaccatctctgggctccaggctgaggatgaggctgattactactgctgctcatatgcaggcagctacacttatgttttcggaact

SEQ ID NO: 255 - DNA, 129 bp, Artificial Sequence
  Description of Artificial Sequence: Synthetic antibody
cctgatcgcttctctggctccaagtcaggcaacacggccgccctgaccatctctgggctccaggctgaggatgaggctgattattactgctgctcatatgcaggcagctacacttatgtcttcggaact

SEQ ID NO: 256 - protein, 43 aa, Artificial Sequence
  Description of Artificial Sequence: Synthetic antibody
PDRFSGSKSGNTAALTISGLQAEDEADYYCCSYAGSYTYVFGT

SEQ ID NO: 257 - DNA, 129 bp, Artificial Sequence
  Description of Artificial Sequence: Synthetic antibody
cctgatcgcttctctggctccaagcctggcaacacggcctccctgaccatctctgggctccaggctgaggatgaggctgattattactgctgctcatatgcaggcagctacacttacgtcttcggaacc

SEQ ID NO: 258 - protein, 43 aa, Artificial Sequence
  Description of Artificial Sequence: Synthetic antibody
PDRFSGSKPGNTASLTISGLQAEDEADYYCCSYAGSYTYVFGT

SEQ ID NO: 259 - DNA, 129 bp, Artificial Sequence
  Description of Artificial Sequence: Synthetic antibody
cctgatcgcttatctggctccaagtctgtcaacacggcctccctgaccatctctgggctccaggctgaggatgaggctgattattactgctgctcatatgcaggcagctacacttatgtcttcggaact

SEQ ID NO: 260 - protein, 43 aa, Artificial Sequence
  Description of Artificial Sequence: Synthetic antibody
PDRLSGSKSVNTASLTISGLQAEDEADYYCCSYAGSYTYVFGT

SEQ ID NO: 261 - DNA, 129 bp, Artificial Sequence
  Description of Artificial Sequence: Synthetic antibody
cctgatcgctcctctggctccaagtctggcaacacggcctccctgaccatctctgggctccaggctgaggatgaggctggttattactgctgctcatatgcaggcagctacacttatgtcttcggaact

SEQ ID NO: 262 - protein, 43 aa, Artificial Sequence
  Description of Artificial Sequence: Synthetic antibody
PDRSSGSKSGNTASLTISGLQAEDEAGYYCCSYAGSYTYVFGT

SEQ ID NO: 263 - DNA, 129 bp, Artificial Sequence
  Description of Artificial Sequence: Synthetic antibody
cctgatcgctcctctggctccaagtctggcaacacggcctccctgaccatctctgggctccaggctgaggatgaggctgattattactgctgctcgtatgcaggcagctacacttatgtcttcggaact

SEQ ID NO: 264 - protein, 43 aa, Artificial Sequence
  Description of Artificial Sequence: Synthetic antibody
PDRSSGSKSGNTASLTISGLQAEDEADYYCCSYAGSYTYVFGT

SEQ ID NO: 265 - DNA, 129 bp, Artificial Sequence
  Description of Artificial Sequence: Synthetic antibody
ccgcttcgcttctctggctccaagtctggcaacacggcctccctgaccatctctgggctccaggctgaggatgaggctgattattactgctgctcatatgcaggcagctacacttatgtcttcggaact

SEQ ID NO: 266 - protein, 43 aa, Artificial Sequence
  Description of Artificial Sequence: Synthetic antibody
PLRFSGSKSGNTASLTISGLQAEDEADYYCCSYAGSYTYVFGT

SEQ ID NO: 267 - DNA, 129 bp, Artificial Sequence
  Description of Artificial Sequence: Synthetic antibody
actgatcgcttctctggctccaagtcttgcaacacggcctccctgaccatctctgggctccaggctgaggatgaggctgattattactgctgctcatatgcaggcagctacacttatgtcttcggaact

SEQ ID NO: 268 - protein, 43 aa, Artificial Sequence
  Description of Artificial Sequence: Synthetic antibody
TDRFSGSKSCNTASLTISGLQAEDEADYYCCSYAGSYTYVFGT

SEQ ID NO: 269 - DNA, 129 bp, Artificial Sequence
  Description of Artificial Sequence: Synthetic antibody
actgatcgcttctctggctccaagtctggcaacacggcctccctgaccatctctgggctccaggctgaggatgaggctgattattactgctgctcatatgcaggcagctacacttatgtcttcggtact

SEQ ID NO: 270 - protein, 43 aa, Artificial Sequence
  Description of Artificial Sequence: Synthetic antibody
TDRFSGSKSGNTASLTISGLQAEDEADYYCCSYAGSYTYVFGT

SEQ ID NO: 271 - DNA, 129 bp, Artificial Sequence
  Description of Artificial Sequence: Synthetic antibody
cctgatcgcttctctggctccaagtctggcaacactgcctccctgaccatctctgggctccaggctgaggatgaggctgattattactgctgctcatatgcaggcagctacacttatgtcttcggaact

SEQ ID NO: 272 - DNA, 129 bp, Artificial Sequence
  Description of Artificial Sequence: Synthetic antibody
cctgatcgcttctctggctccaagtctggcaacacggcctccctgacgatctctgggctccaggctgaggatgaggctgattattactgctgctcatatgcaggcagctacacttatgtcttcggaact

SEQ ID NO: 273 - protein, 11 aa, Artificial Sequence
  Description of Artificial Sequence: Synthetic antibody
CSYAGSYTWVF

SEQ ID NO: 274 - DNA, 129 bp, Artificial Sequence
  Description of Artificial Sequence: Synthetic antibody
gctgatcgcttctctggctccaagtctggcaacacggcctccctgaccatctcttggctccaggctgaggatgaggctgattattactgctgctcatatgcaggcagctacacttgggtgttcggcgga

SEQ ID NO: 275 - protein, 43 aa, Artificial Sequence
  Description of Artificial Sequence: Synthetic antibody
ADRFSGSKSGNTASLTISWLQAEDEADYYCCSYAGSYTWVFGG

SEQ ID NO: 276 - DNA, 129 bp, Artificial Sequence
  Description of Artificial Sequence: Synthetic antibody
ctgttccgcttctctggctccaagtctggcaacacggcctccctgaccatctctgggctccaggctgaggatgaggctgattattactgctgctcatatgcaggcagttacacttgggtgttcggcgga

SEQ ID NO: 277 - protein, 43 aa, Artificial Sequence
  Description of Artificial Sequence: Synthetic antibody
LFRFSGSKSGNTASLTISGLQAEDEADYYCCSYAGSYTWVFGG

SEQ ID NO: 278 - DNA, 129 bp, Artificial Sequence
  Description of Artificial Sequence: Synthetic antibody
ctgatccgcttctctggctccaagtctggcaacacggcctccctgaccatctctgggctccaggctgaggatgaggctgattattactgctgctcatatgcaggcagttacacttgggtgttcggcgga

SEQ ID NO: 279 - protein, 43 aa, Artificial Sequence
  Description of Artificial Sequence: Synthetic antibody
LIRFSGSKSGNTASLTISGLQAEDEADYYCCSYAGSYTWVFGG

SEQ ID NO: 280 - DNA, 129 bp, Artificial Sequence
  Description of Artificial Sequence: Synthetic antibody
ctgatccgcttctctggctccaagtctggcaacacggcctccctgaccatctctgggctccaggctgaggatgaggctgattattactgctgctcatatgcaggcagctacacttgggtgttcggcgga

SEQ ID NO: 281 - DNA, 129 bp, Artificial Sequence
  Description of Artificial Sequence: Synthetic antibody
ccttatcgcttctctggctccaagtctggcaacacggcctccctgaccatctctgggctccaggctgaggatgaggctgattactactgctgctcatatgcaggcagctacacttgggtgttcggcgga

SEQ ID NO: 282 - protein, 43 aa, Artificial Sequence
  Description of Artificial Sequence: Synthetic antibody
PYRFSGSKSGNTASLTISGLQAEDEADYYCCSYAGSYTWVFGG

SEQ ID NO: 283 - DNA, 129 bp, Artificial Sequence
  Description of Artificial Sequence: Synthetic antibody
ccttatcgcttctctggctccaagtctggcaacacggcccccctgaccatctctgggctccaggctgaggatgaggctgattactacggctgctcatatgcaggcagctacacttgggtgttcggcgga

SEQ ID NO: 284 - protein, 43 aa, Artificial Sequence
  Description of Artificial Sequence: Synthetic antibody
PYRFSGSKSGNTAPLTISGLQAEDEADYYGCSYAGSYTWVFGG

SEQ ID NO: 285 - DNA, 129 bp, Artificial Sequence
  Description of Artificial Sequence: Synthetic antibody
ccttatcgcttctctggctccaagcctggcaacacggcctccctgaccgtctctgggctccaggctgaggatgaggctgattactactgctgctcatatgcaggcagctacacttgggtgttcggcgga

SEQ ID NO: 286 - protein, 43 aa, Artificial Sequence
  Description of Artificial Sequence: Synthetic antibody
PYRFSGSKPGNTASLTVSGLQAEDEADYYCCSYAGSYTWVFGG

SEQ ID NO: 287 - DNA, 129 bp, Artificial Sequence
  Description of Artificial Sequence: Synthetic antibody
cctgttcgcttctctggctcgaagtctggcaacacggcctccctgaccatctctgggctccaggctgaggatgaggctgattattactgctgctcatatgcaggcagctacacttgggtgttcggcgga

SEQ ID NO: 288 - protein, 43 aa, Artificial Sequence
  Description of Artificial Sequence: Synthetic antibody
PVRFSGSKSGNTASLTISGLQAEDEADYYCCSYAGSYTWVFGG

SEQ ID NO: 289 - DNA, 129 bp, Artificial Sequence
  Description of Artificial Sequence: Synthetic antibody
cctgttcgcttctctggctccaagtctggcaacacggcctccctgtccatctctgggctccaggctgaggatgaggctgattattactgctgctcatatgcaggcagctacacttgggtattcggcgga

SEQ ID NO: 290 - protein, 43 aa, Artificial Sequence
  Description of Artificial Sequence: Synthetic antibody
PVRFSGSKSGNTASLSISGLQAEDEADYYCCSYAGSYTWVFGG

SEQ ID NO: 291 - DNA, 129 bp, Artificial Sequence
  Description of Artificial Sequence: Synthetic antibody
cctgatcgcttctctggctcgaagtctggcaactcggcctccctgaccatctctgggctccaggctgaggatgaggctgattattactgctgctcatatgcaggcagctacacttgggtattcggcgga

SEQ ID NO: 292 - protein, 43 aa, Artificial Sequence
  Description of Artificial Sequence: Synthetic antibody
PDRFSGSKSGNSASLTISGLQAEDEADYYCCSYAGSYTWVFGG

SEQ ID NO: 293 - DNA, 129 bp, Artificial Sequence
  Description of Artificial Sequence: Synthetic antibody
cctgatcgcttctctggctccaagtctggctactcggcctccctgaccatctctgggctccaggctgaggatgaggctgattattactgctgctcatatgcaggcagctacacttgggtgttcggcgga

SEQ ID NO: 294 - protein, 43 aa, Artificial Sequence
  Description of Artificial Sequence: Synthetic antibody
PDRFSGSKSGYSASLTISGLQAEDEADYYCCSYAGSYTWVFGG

SEQ ID NO: 295 - DNA, 129 bp, Artificial Sequence
  Description of Artificial Sequence: Synthetic antibody
cctgatcgcttctctggctccaagtctggcatctcggcctccctgaccatctctgggctccaggctgaggatgaggctgattattactgctgctcatatgcaggcagttacacttgggtgttcggcgga

SEQ ID NO: 296 - protein, 43 aa, Artificial Sequence
  Description of Artificial Sequence: Synthetic antibody
PDRFSGSKSGISASLTISGLQAEDEADYYCCSYAGSYTWVFGG

SEQ ID NO: 297 - DNA, 129 bp, Artificial Sequence
  Description of Artificial Sequence: Synthetic antibody
cctgatcgcttctctggctccaagtctggcaactcggcctcgctgaccatctctgggctccaggctgaggatgaggctgattattactgctgctcatatgcaggcagctacacttgggtgttcggcgga

SEQ ID NO: 298 - DNA, 129 bp, Artificial Sequence
  Description of Artificial Sequence: Synthetic antibody
cctgatcgcttctctggctccaagtctggcaactcggcctccctgtccatctctgggctccaggctgaggatgaggctgattattactgctgctcatatgcaggcagctacacttgggtgttcggcgga

SEQ ID NO: 299 - protein, 43 aa, Artificial Sequence
  Description of Artificial Sequence: Synthetic antibody
PDRFSGSKSGNSASLSISGLQAEDEADYYCCSYAGSYTWVFGG

SEQ ID NO: 300 - DNA, 129 bp, Artificial Sequence
  Description of Artificial Sequence: Synthetic antibody
cctgatcgcttctctggctccaagtctggcaactcggcctccctggccatctctgggctccaggctgaggatgaggctgattattactgctgctcatatgcaggcagctacacttgggtgttcggcgga

SEQ ID NO: 301 - protein, 43 aa, Artificial Sequence
  Description of Artificial Sequence: Synthetic antibody
PDRFSGSKSGNSASLAISGLQAEDEADYYCCSYAGSYTWVFGG

SEQ ID NO: 302 - DNA, 129 bp, Artificial Sequence
  Description of Artificial Sequence: Synthetic antibody
cctgatcgcttctctggctccaagtctggcaacacggcctccctgtcgatctctgggctccaggctgaggatgaggctgattattactgctgctcatatgcaggcagctacacttgggtgttcggcgga

SEQ ID NO: 303 - protein, 43 aa, Artificial Sequence
  Description of Artificial Sequence: Synthetic antibody
PDRFSGSKSGNTASLSISGLQAEDEADYYCCSYAGSYTWVFGG

SEQ ID NO: 304 - DNA, 129 bp, Artificial Sequence
  Description of Artificial Sequence: Synthetic antibody
cctgatcgcttctctggctccaagtctggcaacacggcctccctgaccatctcttggctccaggctgaggatgaggtcgattattactgctgctcatatgcaggcagctacacttgggtgttcggcgga

SEQ ID NO: 305 - protein, 43 aa, Artificial Sequence
  Description of Artificial Sequence: Synthetic antibody
PDRFSGSKSGNTASLTISWLQAEDEVDYYCCSYAGSYTWVFGG

SEQ ID NO: 306 - DNA, 129 bp, Artificial Sequence
  Description of Artificial Sequence: Synthetic antibody
cctgatcgcttctctggctccaagtctggcaacacggcctccctgaccatctctgggctccaggctgagtgtgaggctgattattactgctgctcatatgcaggcagctacacttgggtgttcggcgga

SEQ ID NO: 307 - protein, 43 aa, Artificial Sequence
  Description of Artificial Sequence: Synthetic antibody
PDRFSGSKSGNTASLTISGLQAECEADYYCCSYAGSYTWVFGG

SEQ ID NO: 308 - DNA, 129 bp, Artificial Sequence
  Description of Artificial Sequence: Synthetic antibody
cctgatcgcttctctggctccaagtctggcaacacggcctccctgaccatctctgggctccaggctgaggatggggctgattattactgctgctcatatgcaggcagctacacttgggtgtttggcgga

SEQ ID NO: 309 - protein, 43 aa, Artificial Sequence
  Description of Artificial Sequence: Synthetic antibody
PDRFSGSKSGNTASLTISGLQAEDGADYYCCSYAGSYTWVFGG

SEQ ID NO: 310 - DNA, 129 bp, Artificial Sequence
  Description of Artificial Sequence: Synthetic antibody
cctgatcgcttctctggctccaagtctggcaacacggcctccctgaccatctctgggctccaggctgaggatgaggctgattattactgttgctcatatgcaggcagctacacttgggtattcggcgga

SEQ ID NO: 311 - protein, 43 aa, Artificial Sequence
  Description of Artificial Sequence: Synthetic antibody
PDRFSGSKSGNTASLTISGLQAEDEADYYCCSYAGSYTWVFGG

SEQ ID NO: 312 - DNA, 129 bp, Artificial Sequence
  Description of Artificial Sequence: Synthetic antibody
cctgatcgcttctctggctccaagtctggcaacacggcctccctgaccatctctgggctccaggctgaggatgaggctgattattactgctgctcatatgcaggcagttacacttgggtgttcggcgga

SEQ ID NO: 313 - DNA, 129 bp, Artificial Sequence
  Description of Artificial Sequence: Synthetic antibody
cctgatcgcttctctggctccaagtctggcaacacggcctccctgaccatctctgggctccaggctgaggatgaggctgattattactgctgctcatatgcaggcagctacacttgggtgttcggcgga

SEQ ID NO: 314 - DNA, 129 bp, Artificial Sequence
  Description of Artificial Sequence: Synthetic antibody
cctgatcgcttctctggctccaagtctggcaacacggcctccctgaccatctctgggctccaggctgaggatgaggctgattattactgctgctcatatgcaggcagctacacttgggtgttcggcgaa

SEQ ID NO: 315 - protein, 43 aa, Artificial Sequence
  Description of Artificial Sequence: Synthetic antibody
PDRFSGSKSGNTASLTISGLQAEDEADYYCCSYAGSYTWVFGE

SEQ ID NO: 316 - DNA, 129 bp, Artificial Sequence
  Description of Artificial Sequence: Synthetic antibody
cctgatcgcttctctggctccaagtctggcaacacggcctccctgaccatctctgggctccaggctgaggatgaggctgattattactgctgctcatatgcaggcagctacacttgggtattcggcgga

SEQ ID NO: 317 - DNA, 129 bp, Artificial Sequence
  Description of Artificial Sequence: Synthetic antibody
cctgatcgcttctctggctccaactcaggcaacacggcctccctgaccatctctgggctccaggctgaggatgaggctgattattactgctgctcatatgcaggcagttacacttgggtgttcggcgga

SEQ ID NO: 318 - protein, 43 aa, Artificial Sequence
  Description of Artificial Sequence: Synthetic antibody
PDRFSGSNSGNTASLTISGLQAEDEADYYCCSYAGSYTWVFGG

SEQ ID NO: 319 - DNA, 129 bp, Artificial Sequence
  Description of Artificial Sequence: Synthetic antibody
ccggttcgcttctctggctccaagtctggcaacacggcctccctgaccatctctgggctccaggctgaggatgaggctgattattactgctgctcatatgcaggcagctacacttgggtgttcggcgga

SEQ ID NO: 320 - DNA, 129 bp, Artificial Sequence
  Description of Artificial Sequence: Synthetic antibody
ccttatcgcttctctggctccaagtctggcaacacggcctccctgaccatctctgggctccaggctgaggatgaggctgattactactgctgctcatatgcaggcagctacacctgggtgttcggcgga

SEQ ID NO: 321 - protein, 12 aa, Artificial Sequence
  Description of Artificial Sequence: Synthetic antibody
CSYAGSSTFVVF

SEQ ID NO: 322 - DNA, 129 bp, Artificial Sequence
  Description of Artificial Sequence: Synthetic antibody
aatcgcttctctgtctccaagtctggcaacacggcctccctgacaatctctgggctccaggctgaggacgaggctgattattactgctgctcatatgcaggtagtagcactttcgtggttttcggcgga

SEQ ID NO: 323 - protein, 43 aa, Artificial Sequence
  Description of Artificial Sequence: Synthetic antibody
NRFSVSKSGNTASLTISGLQAEDEADYYCCSYAGSSTFVVFGG

SEQ ID NO: 324 - DNA, 129 bp, Artificial Sequence
  Description of Artificial Sequence: Synthetic antibody
aatcgcttctctggctcgaagtctggcaacagggcctccctgacaatctctgggctccaggctgaggacgaggctgattattactgctgctcatatgcaggtagtagcactttcgtggtattcggcgga

SEQ ID NO: 325 - protein, 43 aa, Artificial Sequence
  Description of Artificial Sequence: Synthetic antibody
NRFSGSKSGNRASLTISGLQAEDEADYYCCSYAGSSTFVVFGG

SEQ ID NO: 326 - DNA, 129 bp, Artificial Sequence
  Description of Artificial Sequence: Synthetic antibody
aatcgcttctctggctccatgtctggctacacggcctccctgacaatctctgggctccaggctgaggacgaggctgattattactgctgctcatatgcaggtagtagcactttcgtggtattcggcgga

SEQ ID NO: 327 - protein, 43 aa, Artificial Sequence
  Description of Artificial Sequence: Synthetic antibody
NRFSGSMSGYTASLTISGLQAEDEADYYCCSYAGSSTFVVFGG

SEQ ID NO: 328 - DNA, 129 bp, Artificial Sequence
  Description of Artificial Sequence: Synthetic antibody
aatcgcttctctggctccatgtctggcatcacggcctccctgacaatctctgggctccaggctgaggacgaggctgattattactgctgctcatatgcaggtagtagcactttcgttgtattcggcgga

SEQ ID NO: 329 - protein, 43 aa, Artificial Sequence
  Description of Artificial Sequence: Synthetic antibody
NRFSGSMSGITASLTISGLQAEDEADYYCCSYAGSSTFVVFGG

SEQ ID NO: 330 - DNA, 129 bp, Artificial Sequence
  Description of Artificial Sequence: Synthetic antibody
aatcgcttctctggctccatgtctggcaacacggcctccctgacaatctcttggctccaggctgaggacgaggctgattattactgctgctcatatgcaggtagtagcactttcgtggtattcggcgga

SEQ ID NO: 331 - protein, 43 aa, Artificial Sequence
  Description of Artificial Sequence: Synthetic antibody
NRFSGSMSGNTASLTISWLQAEDEADYYCCSYAGSSTFVVFGG

SEQ ID NO: 332 - DNA, 129 bp, Artificial Sequence
  Description of Artificial Sequence: Synthetic antibody
aatcgcttctctggctccaagtctggcaacactgcctccctgacaatctcttggctccaggctgaggacgaggctgattattactgctgctcatatgcaggtagtagcactttcgtggtattcggcgga

SEQ ID NO: 333 - protein, 43 aa, Artificial Sequence
  Description of Artificial Sequence: Synthetic antibody
NRFSGSKSGNTASLTISWLQAEDEADYYCCSYAGSSTFVVFGG

SEQ ID NO: 334 - DNA, 129 bp, Artificial Sequence
  Description of Artificial Sequence: Synthetic antibody
aatcgcttctctggctccaagtctggcaacacggtctccctgacaatctctaggctccaggctgaggacgaggctgattattactgctgctcatatgcaggtagtagcactttcgttgtattcggcgga

SEQ ID NO: 335 - protein, 43 aa, Artificial Sequence
  Description of Artificial Sequence: Synthetic antibody
NRFSGSKSGNTVSLTISRLQAEDEADYYCCSYAGSSTFVVFGG

SEQ ID NO: 336 - DNA, 129 bp, Artificial Sequence
  Description of Artificial Sequence: Synthetic antibody
aatcgcttctctggctccaagtctggcaacacggcctccctgtcaatctctgggctccaggctgaggacgaggctgattattactgctgctcatatgcaggtagtagcactttcgtggttttcggcgga

SEQ ID NO: 337 - protein, 43 aa, Artificial Sequence
  Description of Artificial Sequence: Synthetic antibody
NRFSGSKSGNTASLSISGLQAEDEADYYCCSYAGSSTFVVFGG

SEQ ID NO: 338 - DNA, 129 bp, Artificial Sequence
  Description of Artificial Sequence: Synthetic antibody
aatcgcttctctggctccaagtctggcaacacggcctccctgactatctctgggctccaggctgtggacgaggctgattattactgctgctcatatgcaggtagtagcactttcgtggtattcggcgga

SEQ ID NO: 339 - protein, 43 aa, Artificial Sequence
  Description of Artificial Sequence: Synthetic antibody
NRFSGSKSGNTASLTISGLQAVDEADYYCCSYAGSSTFVVFGG

SEQ ID NO: 340 - DNA, 129 bp, Artificial Sequence
  Description of Artificial Sequence: Synthetic antibody
aatcgcttctctggctccaagtctggcaacacggcctccctgacattctctgggctgcaggctgaggacgaggctgattattactgctgctcatatgcaggtagtagcactttcgtggtattcggcgga

SEQ ID NO: 341 - protein, 43 aa, Artificial Sequence
  Description of Artificial Sequence: Synthetic antibody
NRFSGSKSGNTASLTFSGLQAEDEADYYCCSYAGSSTFVVFGG

SEQ ID NO: 342 - DNA, 129 bp, Artificial Sequence
  Description of Artificial Sequence: Synthetic antibody
aatcgcttctctggctccaagtctggcaacacggcctccctgacaatctctgggctccaggctgaggacgaggctgattattgccgctgctcatatgcaggtagtagcactttcgtggtattcggcgga

SEQ ID NO: 343 - protein, 43 aa, Artificial Sequence
  Description of Artificial Sequence: Synthetic antibody
NRFSGSKSGNTASLTISGLQAEDEADYCRCSYAGSSTFVVFGG

SEQ ID NO: 344 - DNA, 129 bp, Artificial Sequence
  Description of Artificial Sequence: Synthetic antibody
aatcgcttctctggctccaagtctggcaacacggcctccctgacaatctctgggctccaggctgaggacgaggctgattattactgctgctcatatgcaggtagtagcacttttgtggtattcggcgga

SEQ ID NO: 345 - protein, 43 aa, Artificial Sequence
  Description of Artificial Sequence: Synthetic antibody
NRFSGSKSGNTASLTISGLQAEDEADYYCCSYAGSSTFVVFGG

SEQ ID NO: 346 - DNA, 129 bp, Artificial Sequence
  Description of Artificial Sequence: Synthetic antibody
aatcgcttctctggctccaagtctggcaacacggcctccctgacaatctctgggctccaggctgaggacgaggctgattattactgctgctcatatgcaggtagtagcactttcgttgtattcggcgga

SEQ ID NO: 347 - DNA, 129 bp, Artificial Sequence
  Description of Artificial Sequence: Synthetic antibody
aatcgcttctctggctccaagtctggcaacacggcctccctgacaatctctgggctccaggctgaggacgaggctgattattactgctgctcatatgcaggtagtagcactttcgtggtattcggcgga

SEQ ID NO: 348 - DNA, 129 bp, Artificial Sequence
  Description of Artificial Sequence: Synthetic antibody
aatcgcttctctggctccaagtctggcaacacggcctccctgacaatctctaggctccaggctgaggacgaggctgattattactgctgctcatatgcaggtagtagcactttcgtcgtattcggcgga

SEQ ID NO: 349 - protein, 43 aa, Artificial Sequence
  Description of Artificial Sequence: Synthetic antibody
NRFSGSKSGNTASLTISRLQAEDEADYYCCSYAGSSTFVVFGG

SEQ ID NO: 350 - DNA, 129 bp, Artificial Sequence
  Description of Artificial Sequence: Synthetic antibody
aatcgcttctctggctccaagtctggcaacacggcctccctgacaatctcatggctccaggctgaggacgaggctgattattactgctgctcatatgcaggtagtagcactttcgtggtattcggcgga

SEQ ID NO: 351 - DNA, 129 bp, Artificial Sequence
  Description of Artificial Sequence: Synthetic antibody
aatcgcttctctggctccaagtctggcaacacggcctcactgacaatctcttggctccaggctgaggacgaggctgattattactgctgctcatatgcaggtagtagcactttcgtggtattcggcgga

SEQ ID NO: 352 - DNA, 129 bp, Artificial Sequence
  Description of Artificial Sequence: Synthetic antibody
aatcgcttctctggctccaagtctggcaacacggcccccctgacaatctctgggctccaggctgaggacgaggctgattattaccgctgctcatatgcaggtagtagcactttcgttgtattcggcgga

SEQ ID NO: 353 - protein, 43 aa, Artificial Sequence
  Description of Artificial Sequence: Synthetic antibody
NRFSGSKSGNTAPLTISGLQAEDEADYYRCSYAGSSTFVVFGG

SEQ ID NO: 354 - DNA, 129 bp, Artificial Sequence
  Description of Artificial Sequence: Synthetic antibody
aatcgcttctctggctccaagtctggaaacactgcctccctgacaatctctgggctccaggctgaggacgaggctgattattactgctgctcatatgcaggtagtagcactttcgtggtattcggcgga

SEQ ID NO: 355 - DNA, 129 bp, Artificial Sequence
  Description of Artificial Sequence: Synthetic antibody
aatcgcttctctgactccaagtctggcaacacggcctccctgacaatctctgggctccaggctgaggacgaggctgattattactgctgctcatatgcaggtagtagcactttcgtggtattcggcggc

SEQ ID NO: 356 - protein, 43 aa, Artificial Sequence
  Description of Artificial Sequence: Synthetic antibody
NRFSDSKSGNTASLTISGLQAEDEADYYCCSYAGSSTFVVFGG

SEQ ID NO: 357 - DNA, 129 bp, Artificial Sequence
  Description of Artificial Sequence: Synthetic antibody
atccgcttctctggctccaagtctggcaacacggcctccctgacaatctctgggctccaggctgaggacgaggctgattattactgctgctcatatgcaggtagtagcacttttgtggtattcggcgga

SEQ ID NO: 358 - protein, 43 aa, Artificial Sequence
  Description of Artificial Sequence: Synthetic antibody
IRFSGSKSGNTASLTISGLQAEDEADYYCCSYAGSSTFVVFGG

SEQ ID NO: 359 - DNA, 129 bp, Artificial Sequence
  Description of Artificial Sequence: Synthetic antibody
atccgcttctctggctccaagtctggcaacacggcctccctgacaatctctgggctccaggctgaggacgaggctgattattactgctgctcatatgcaggtagtagcactttcgttgtattcggcgga

SEQ ID NO: 360 - DNA, 129 bp, Artificial Sequence
  Description of Artificial Sequence: Synthetic antibody
atccgcttctctggctccaagtctggcaacacggcctccctgacaatctctgggctccaggctgaggacgaggctgattattactgctgctcatatgcaggtagtagcactttcgtggtattcggcgga

SEQ ID NO: 361 - DNA, 129 bp, Artificial Sequence
  Description of Artificial Sequence: Synthetic antibody
atacgcttctctggctccaagtctggcaacacggcctccctgacaatctctgggctccaggctgaggacgaggctgattattactgctgctcatatgcaggtagtagcactttcgtggtattcggcgga

SEQ ID NO: 362 - protein, 11 aa, Artificial Sequence
  Description of Artificial Sequence: Synthetic antibody
CSYAGSSTFVF

SEQ ID NO: 363 - DNA, 129 bp, Artificial Sequence
  Description of Artificial Sequence: Synthetic antibody
ttctatcgcttctctggctccaagtctggcaacacggcctccctgacaatctctgggctccaggctgaggacgaggctgattattactgctgctcatatgcaggtagtagcactttcgtattcggcgga

SEQ ID NO: 364 - protein, 43 aa, Artificial Sequence
  Description of Artificial Sequence: Synthetic antibody
FYRFSGSKSGNTASLTISGLQAEDEADYYCCSYAGSSTFVFGG

SEQ ID NO: 365 - DNA, 129 bp, Artificial Sequence
  Description of Artificial Sequence: Synthetic antibody
tcttatcgcttctctggctccatgtctggcaacacggcctccctgacaatctctgggctccaggctgaggacgaggctgattattactgctgctcatatgcaggtagtagcactttcgtattcggcgga

SEQ ID NO: 366 - protein, 43 aa, Artificial Sequence
  Description of Artificial Sequence: Synthetic antibody
SYRFSGSMSGNTASLTISGLQAEDEADYYCCSYAGSSTFVFGG

SEQ ID NO: 367 - DNA, 129 bp, Artificial Sequence
  Description of Artificial Sequence: Synthetic antibody
tctattcgcttctctggctccaagtctggcatcacggcctccctgacaatctcttggctccaggctgaggacgaggctgattattactgctgctcatatgcaggtagtagcactttcgtattcggcgga

SEQ ID NO: 368 - protein, 43 aa, Artificial Sequence
  Description of Artificial Sequence: Synthetic antibody
SIRFSGSKSGITASLTISWLQAEDEADYYCCSYAGSSTFVFGG

SEQ ID NO: 369 - DNA, 129 bp, Artificial Sequence
  Description of Artificial Sequence: Synthetic antibody
tctaatcgcttctctggctgcaagtctggcaacacggcctccctgagaatctctgggctccaggctgaggacgaggctgattattactgctgctcatatgcaggtagtagcactttcgtattcggcgga

SEQ ID NO: 370 - protein, 43 aa, Artificial Sequence
  Description of Artificial Sequence: Synthetic antibody
SNRFSGCKSGNTASLRISGLQAEDEADYYCCSYAGSSTFVFGG

SEQ ID NO: 371 - DNA, 129 bp, Artificial Sequence
  Description of Artificial Sequence: Synthetic antibody
tctaatcgcttctctggctccaagtcttgcaacacggcctccctgagaatctctgggctccaggctgaggacgaggctgattattactgctgctcatatgcaggtagtagcactttcgtattcggcgga

SEQ ID NO: 372 - protein, 43 aa, Artificial Sequence
  Description of Artificial Sequence: Synthetic antibody
SNRFSGSKSCNTASLRISGLQAEDEADYYCCSYAGSSTFVFGG

SEQ ID NO: 373 - DNA, 129 bp, Artificial Sequence
  Description of Artificial Sequence: Synthetic antibody
tctaatcgcttctctggctccaagtctggcgacacggcctccctgacaatctctggactccaggctgaggacgaggctgattattactgctgctcatatgcaggtagtagcactttcgtattcggcgga

SEQ ID NO: 374 - protein, 43 aa, Artificial Sequence
  Description of Artificial Sequence: Synthetic antibody
SNRFSGSKSGDTASLTISGLQAEDEADYYCCSYAGSSTFVFGG

SEQ ID NO: 375 - DNA, 129 bp, Artificial Sequence
  Description of Artificial Sequence: Synthetic antibody
tctaatcgcttctctggctccaagtctggcaagactgcctccctgacaatctcttggctccaggctgaggacgaggctgattattactgctgctcatatgcaggtagtagcactttcgtattcggcgga

SEQ ID NO: 376 - protein, 43 aa, Artificial Sequence
  Description of Artificial Sequence: Synthetic antibody
SNRFSGSKSGKTASLTISWLQAEDEADYYCCSYAGSSTFVFGG

SEQ ID NO: 377 - DNA, 129 bp, Artificial Sequence
  Description of Artificial Sequence: Synthetic antibody
tctaatcgcttctctggctccaagtctggcaagacggcctcgctgacaatctctgggctccaggctgaggacgaggctgattattactgctgctcatatgcaggtagtagcactttcgtattcggcgga

SEQ ID NO: 378 - protein, 43 aa, Artificial Sequence
  Description of Artificial Sequence: Synthetic antibody
SNRFSGSKSGKTASLTISGLQAEDEADYYCCSYAGSSTFVFGG

SEQ ID NO: 379 - DNA, 129 bp, Artificial Sequence
  Description of Artificial Sequence: Synthetic antibody
tctaatcgcttctctggctccaagtctggcaagacggcctccctgagaatctctgggctccaggctgaggacgaggctgattattactgctgctcatatgcaggtagtagcactttcgtattcggcgga

SEQ ID NO: 380 - protein, 43 aa, Artificial Sequence
  Description of Artificial Sequence: Synthetic antibody
SNRFSGSKSGKTASLRISGLQAEDEADYYCCSYAGSSTFVFGG

SEQ ID NO: 381 - DNA, 129 bp, Artificial Sequence
  Description of Artificial Sequence: Synthetic antibody
tctaatcgcttctctggctccaagtctggcaactcggcctccctgactatctctgggctccaggctgaggacgaggctgattattactgctgctcatatgcaggtagtagcactttcgtattcggcgga

SEQ ID NO: 382 - protein, 43 aa, Artificial Sequence
  Description of Artificial Sequence: Synthetic antibody
SNRFSGSKSGNSASLTISGLQAEDEADYYCCSYAGSSTFVFGG

SEQ ID NO: 383 - DNA, 129 bp, Artificial Sequence
  Description of Artificial Sequence: Synthetic antibody
tctaatcgcttctctggctccaagtctggcaacacggcctccctgtcaatctctgggctcctggctgaggacgaggctgattattactgctgctcatatgcaggtagtagcactttcgtattcggcgga

SEQ ID NO: 384 - protein, 43 aa, Artificial Sequence
  Description of Artificial Sequence: Synthetic antibody
SNRFSGSKSGNTASLSISGLLAEDEADYYCCSYAGSSTFVFGG

SEQ ID NO: 385 - DNA, 129 bp, Artificial Sequence
  Description of Artificial Sequence: Synthetic antibody
tctaatcgcttctctggctccaagtctggcaacacggcctccctgactttctctgggctccaggctgaggacgaggctgattattactgctgctcatatgcaggtagtagcactttcgtattcggcgga

SEQ ID NO: 386 - protein, 43 aa, Artificial Sequence
  Description of Artificial Sequence: Synthetic antibody
SNRFSGSKSGNTASLTFSGLQAEDEADYYCCSYAGSSTFVFGG

SEQ ID NO: 387 - DNA, 129 bp, Artificial Sequence
  Description of Artificial Sequence: Synthetic antibody
tctaatcgcttctctggctccaagtctggcaacacggcctccctgacaatctctgggctccagtctgaggacgatgctgattattactgctgctcatatgcaggtagtagcactttcgtattcggcgga

SEQ ID NO: 388 - protein, 43 aa, Artificial Sequence
  Description of Artificial Sequence: Synthetic antibody
SNRFSGSKSGNTASLTISGLQSEDDADYYCCSYAGSSTFVFGG

SEQ ID NO: 389 - DNA, 129 bp, Artificial Sequence
  Description of Artificial Sequence: Synthetic antibody
tctaatcgcttctctggctccaagtctggcaacacggcctccctgacaatctctgggctccaggctgaggacgaggctgattattactgctgctcatatgcaggtagtagcactttcgtattcggcgga

SEQ ID NO: 390 - protein, 43 aa, Artificial Sequence
  Description of Artificial Sequence: Synthetic antibody
SNRFSGSKSGNTASLTISGLQAEDEADYYCCSYAGSSTFVFGG

SEQ ID NO: 391 - DNA, 129 bp, Artificial Sequence
  Description of Artificial Sequence: Synthetic antibody
tctaatcgcttctctggctccaagtctggcaacacggcctccctgacaatctctgggctccaggctgaggacgaggctgattattactgctgctcatatgcaggtagcagcaccttcgtattcggcggc

SEQ ID NO: 392 - DNA, 129 bp, Artificial Sequence
  Description of Artificial Sequence: Synthetic antibody
tctaatcgcttctctggctccaagtctggcaacacggcctccctgacaatccctgggctccaggctgaggacggggctgattattactgctgctcatatgcaggtagtagcactttcgtattcggcgga

SEQ ID NO: 393 - protein, 43 aa, Artificial Sequence
  Description of Artificial Sequence: Synthetic antibody
SNRFSGSKSGNTASLTIPGLQAEDGADYYCCSYAGSSTFVFGG

SEQ ID NO: 394 - DNA, 129 bp, Artificial Sequence
  Description of Artificial Sequence: Synthetic antibody
tctaatcgcttctctggctccaagtctggcaacacggcccccctgacaatctctgggctccaggctgaggacgaggccgattattactgctgctcatatgcaggtagtagcactttcgtattcggcgga

SEQ ID NO: 395 - protein, 43 aa, Artificial Sequence
  Description of Artificial Sequence: Synthetic antibody
SNRFSGSKSGNTAPLTISGLQAEDEADYYCCSYAGSSTFVFGG

SEQ ID NO: 396 - DNA, 129 bp, Artificial Sequence
  Description of Artificial Sequence: Synthetic antibody
cttatccgcttctctggctccaagtctggcaacacggcctccctgacaatctctgggctccaggctgaggacgaggctgattattactgctgctcatatgcaggtagtagcactttcgtattcggcgga

SEQ ID NO: 397 - protein, 43 aa, Artificial Sequence
  Description of Artificial Sequence: Synthetic antibody
LIRFSGSKSGNTASLTISGLQAEDEADYYCCSYAGSSTFVFGG

SEQ ID NO: 398 - DNA, 129 bp, Artificial Sequence
  Description of Artificial Sequence: Synthetic antibody
ctaatccgcttctctggctccaagtctggcaacacggcctccctgacaatctctgggctccaggctgaggacgaggctgattattactgctgctcatatgcaggtagtagcactttcgtattcggcgga

SEQ ID NO: 399 - DNA, 129 bp, Artificial Sequence
  Description of Artificial Sequence: Synthetic antibody
ctaatacgcttctctggctccaagtctggcaacacggcctccctgacaatctctgggctccaggctgaggacgaggctgattattactgctgctcatatgcaggtagtagcactttcgtattcggcgga

SEQ ID NO: 400 - protein, 12 aa, Artificial Sequence
  Description of Artificial Sequence: Synthetic antibody
CSYAGSSTYVVF

SEQ ID NO: 401 - DNA, 129 bp, Artificial Sequence
  Description of Artificial Sequence: Synthetic antibody
attcgcttctctggctccaagtctggcaacacggcctccctgtcaatctctgggctccaggctgaggacgaggctgattattactgctgctcatatgcaggtagtagcacttatgtggtattcggcgga

SEQ ID NO: 402 - protein, 43 aa, Artificial Sequence
  Description of Artificial Sequence: Synthetic antibody
IRFSGSKSGNTASLSISGLQAEDEADYYCCSYAGSSTYVVFGG

SEQ ID NO: 403 - DNA, 129 bp, Artificial Sequence
  Description of Artificial Sequence: Synthetic antibody
aatcgcttctctggctccatgtctggcaagacggcctccctgacaatctctgggctccaggctgaggacgaggctgattattactgctgctcatatgcaggtagtagcacttatgtggtattcggcgga

SEQ ID NO: 404 - protein, 43 aa, Artificial Sequence
  Description of Artificial Sequence: Synthetic antibody
NRFSGSMSGKTASLTISGLQAEDEADYYCCSYAGSSTYVVFGG

SEQ ID NO: 405 - DNA, 129 bp, Artificial Sequence
  Description of Artificial Sequence: Synthetic antibody
aatcgcttctctggctccaagtctggctacacggcctccctgtcaatctctgggctccaggctgaggacgaggctgattattactgctgctcatatgcaggtagtagcacttatgtggtattcggcgga

SEQ ID NO: 406 - protein, 43 aa, Artificial Sequence
  Description of Artificial Sequence: Synthetic antibody
NRFSGSKSGYTASLSISGLQAEDEADYYCCSYAGSSTYVVFGG

SEQ ID NO: 407 - DNA, 129 bp, Artificial Sequence
  Description of Artificial Sequence: Synthetic antibody
aatcgcttctctggctccaagtctggcatcacggcctccctgtcaatctctgggctccaggctgaggacgaggctgattattactgctgctcatatgcaggtagtagcacttatgtggtattcggcgga

SEQ ID NO: 408 - protein, 43 aa, Artificial Sequence
  Description of Artificial Sequence: Synthetic antibody
NRFSGSKSGITASLSISGLQAEDEADYYCCSYAGSSTYVVFGG

SEQ ID NO: 409 - DNA, 129 bp, Artificial Sequence
  Description of Artificial Sequence: Synthetic antibody
aatcgcttctctggctccaagtctggcaactcggcctccctgactatctctgggctccaggctgaggacgaggctgattattactgctgctcatatgcaggtagtagcacttatgtggtattcggcgga

SEQ ID NO: 410 - protein, 43 aa, Artificial Sequence
  Description of Artificial Sequence: Synthetic antibody
NRFSGSKSGNSASLTISGLQAEDEADYYCCSYAGSSTYVVFGG

SEQ ID NO: 411 - DNA, 129 bp, Artificial Sequence
  Description of Artificial Sequence: Synthetic antibody
aatcgcttctctggctccaagtctggcaacgcggcctccctgacaatctctgggctccaggctgaggacgaggctgattattactgctgctcatatgcgggtagtagcacttatgtggtattcggcgga

SEQ ID NO: 412 - protein, 43 aa, Artificial Sequence
  Description of Artificial Sequence: Synthetic antibody
NRFSGSKSGNAASLTISGLQAEDEADYYCCSYAGSSTYVVFGG

SEQ ID NO: 413 - DNA, 129 bp, Artificial Sequence
  Description of Artificial Sequence: Synthetic antibody
aatcgcttctctggctccaagtctggcaacactgcctccctgacaatctctgggctccaggctgagtacgaggctgattattactgctgctcatatgcaggtagtagcacttatgtggtattcggcgga

SEQ ID NO: 414 - protein, 43 aa, Artificial Sequence
  Description of Artificial Sequence: Synthetic antibody
NRFSGSKSGNTASLTISGLQAEYEADYYCCSYAGSSTYVVFGG

SEQ ID NO: 415 - DNA, 129 bp, Artificial Sequence
  Description of Artificial Sequence: Synthetic antibody
aatcgcttctctggctccaagtctggcaacacggcctccctgacaatctctgggctccaggctgaggacgaggctgattattactgctgctcatatgcaggtagtagcacttatgtggtattcggcgga

SEQ ID NO: 416 - protein, 43 aa, Artificial Sequence
  Description of Artificial Sequence: Synthetic antibody
NRFSGSKSGNTASLTISGLQAEDEADYYCCSYAGSSTYVVFGG

SEQ ID NO: 417 - DNA, 129 bp, Artificial Sequence
  Description of Artificial Sequence: Synthetic antibody
aatcgcttctctggctccaagtctggcaacacggcctccctgacaatctctgggctccaggctgaggacgaggctgattattactgctgctcatatgcaggtagtagcacgtatgtggtattcggcgga

SEQ ID NO: 418 - DNA, 129 bp, Artificial Sequence
  Description of Artificial Sequence: Synthetic antibody
aatcgcttctctggctccaagtctggcaacacggcctccctgacaatctctgggctccaggctgaggacgaggctgattattactgctgctcatatgcaggtagtagcacctatgtggtattcggcgga

SEQ ID NO: 419 - DNA, 129 bp, Artificial Sequence
  Description of Artificial Sequence: Synthetic antibody
aatcgcttctctggctccaagtctggcaacacggcctccctgacaatctctgggctccaggctgaggacgaggctgattattactgctgctcatatgcaggtagtagcacatatgtggtattcggcgga

SEQ ID NO: 420 - DNA, 129 bp, Artificial Sequence
  Description of Artificial Sequence: Synthetic antibody
aatcgcttctctggctccaagtctcgcaacacggcctacctgacaatctctgggctccaggctgaggacgaggctgattattactgctgctcatatgcaggtagtagcacttatgtggtattcggcgga

SEQ ID NO: 421 - protein, 43 aa, Artificial Sequence
  Description of Artificial Sequence: Synthetic antibody
NRFSGSKSRNTAYLTISGLQAEDEADYYCCSYAGSSTYVVFGG

SEQ ID NO: 422 - DNA, 129 bp, Artificial Sequence
  Description of Artificial Sequence: Synthetic antibody
atccgcttctctggctccaagtctggcaacacggcctccctgacaatctctgggctccaggctgaggacgaggctgattattactgctgctcatatgcaggtagtagcacttatgtggtattcggcgga

SEQ ID NO: 423 - protein, 43 aa, Artificial Sequence
  Description of Artificial Sequence: Synthetic antibody
IRFSGSKSGNTASLTISGLQAEDEADYYCCSYAGSSTYVVFGG

SEQ ID NO: 424 - DNA, 129 bp, Artificial Sequence
  Description of Artificial Sequence: Synthetic antibody
atccgcttctctggctccaagtctggcaacacggcctccctgacaatctctgggctccaggctgaggacgaggctgattattactgctgctcatatgcaggtagtagcacgtatgtggtattcggcgga

SEQ ID NO: 425 - DNA, 129 bp, Artificial Sequence
  Description of Artificial Sequence: Synthetic antibody
atccgcttctctggctccaagtctggcaacacggcctccctgacaatctctgggctccaggctgaggacgaggctgattattactgctgctcatatgcaggtagtagcacctatgtggtattcggcgga

SEQ ID NO: 426 - DNA, 129 bp, Artificial Sequence
  Description of Artificial Sequence: Synthetic antibody
atccgcttctctggctccaagtctggcaacacggcctccctgacaatctctgggctccaggctgaggacgaggctgattattactgctgctcatatgcaggtagtagcacatatgtggtattcggcgga

SEQ ID NO: 427 - DNA, 129 bp, Artificial Sequence
  Description of Artificial Sequence: Synthetic antibody
atacgcttctctggctccaagtctggcaacacggcctccctgacaatctctgggctccaggctgaggacgaggctgattattactgctgctcatatgcaggtagtagcacttatgtggtattcggcgga

SEQ ID NO: 428 - DNA, 129 bp, Artificial Sequence
  Description of Artificial Sequence: Synthetic antibody
atacgcttctctggctccaagtctggcaacacggcctccctgacaatctctgggctccaggctgaggacgaggctgattattactgctgctcatatgcaggtagtagcacatatgtggtattcggcgga

SEQ ID NO: 429 - protein, 12 aa, Artificial Sequence
  Description of Artificial Sequence: Synthetic antibody
CSYAGSSTFYVF

SEQ ID NO: 430 - DNA, 129 bp, Artificial Sequence
  Description of Artificial Sequence: Synthetic antibody
tatcgcttctctggctccaagtctggcaactcggcctccctgacaatctctgggctccaggctgaggacgaggctgattattactgctgctcatatgcaggtagtagcactttttatgtcttcggaact

SEQ ID NO: 431 - protein, 43 aa, Artificial Sequence
  Description of Artificial Sequence: Synthetic antibody
YRFSGSKSGNSASLTISGLQAEDEADYYCCSYAGSSTFYVFGT

SEQ ID NO: 432 - DNA, 129 bp, Artificial Sequence
  Description of Artificial Sequence: Synthetic antibody
attcgcttctctggctccatgtctggcaacacggcctccctgacaatctctgggctccaggctgaggacgaggctgattattactgctgctcatatgcaggtagtagcactttttatgtcttcggaact

SEQ ID NO: 433 - protein, 43 aa, Artificial Sequence
  Description of Artificial Sequence: Synthetic antibody
IRFSGSMSGNTASLTISGLQAEDEADYYCCSYAGSSTFYVFGT

SEQ ID NO: 434 - DNA, 129 bp, Artificial Sequence
  Description of Artificial Sequence: Synthetic antibody
actcgcttctctggctccaagtcttgcaacacggcctccctgacaatctctgggctccaggctgaggacgaggctgattattactgctgctcatatgcaggtagtagcactttttatgtcttcggaact

SEQ ID NO: 435 - protein, 43 aa, Artificial Sequence
  Description of Artificial Sequence: Synthetic antibody
TRFSGSKSCNTASLTISGLQAEDEADYYCCSYAGSSTFYVFGT

SEQ ID NO: 436 - DNA, 129 bp, Artificial Sequence
  Description of Artificial Sequence: Synthetic antibody
aatcgcttctctggctgcaagtctggcatcacggcctccctgacaatctctgggctccaggctgaggacgaggctgattattactgctgctcatatgcaggtagtagcactttttatgtcttcggaact

SEQ ID NO: 437 - protein, 43 aa, Artificial Sequence
  Description of Artificial Sequence: Synthetic antibody
NRFSGCKSGITASLTISGLQAEDEADYYCCSYAGSSTFYVFGT

SEQ ID NO: 438 - DNA, 129 bp, Artificial Sequence
  Description of Artificial Sequence: Synthetic antibody
aatcgcttctctggctccaagtctggctacacggcctccctgacattctctgggctccaggctgaggacgaggctgattattactgctgctcatatgcaggtagtagcactttttatgtcttcggaact

SEQ ID NO: 439 - protein, 43 aa, Artificial Sequence
  Description of Artificial Sequence: Synthetic antibody
NRFSGSKSGYTASLTFSGLQAEDEADYYCCSYAGSSTFYVFGT

SEQ ID NO: 440 - DNA, 129 bp, Artificial Sequence
  Description of Artificial Sequence: Synthetic antibody
aatcgcttctctggctccaagtctggctacacggcctccctgacaatctctgggctcctggctgaggacgaggctgattattactgctgctcatatgcaggtagtagcaccttttatgtcttcggaact

SEQ ID NO: 441 - protein, 43 aa, Artificial Sequence
  Description of Artificial Sequence: Synthetic antibody
NRFSGSKSGYTASLTISGLLAEDEADYYCCSYAGSSTFYVFGT

SEQ ID NO: 442 - DNA, 129 bp, Artificial Sequence
  Description of Artificial Sequence: Synthetic antibody
aatcgcttctctggctccaagtctggcatcacggcctccctgacaatctcttggctccaggctgaggacgaggctgattattactgctgctcatatgcaggtagtagcactttctatgtcttcggaact

SEQ ID NO: 443 - protein, 43 aa, Artificial Sequence
  Description of Artificial Sequence: Synthetic antibody
NRFSGSKSGITASLTISWLQAEDEADYYCCSYAGSSTFYVFGT

SEQ ID NO: 444 - DNA, 129 bp, Artificial Sequence
  Description of Artificial Sequence: Synthetic antibody
aatcgcttctctggctccaagtctggcaagacggcctccctgactatctctgggctccaggctgaggacgaggctgattattactgctgctcatatgcaggtagtagcactttttatgtcttcggaact

SEQ ID NO: 445 - protein, 43 aa, Artificial Sequence
  Description of Artificial Sequence: Synthetic antibody
NRFSGSKSGKTASLTISGLQAEDEADYYCCSYAGSSTFYVFGT

SEQ ID NO: 446 - DNA, 129 bp, Artificial Sequence
  Description of Artificial Sequence: Synthetic antibody
aatcgcttctctggctccaagtctggcaacacggcctccctgacattctctgggctccaggctgaggtcgaggctgattattactgctgctcatatgcaggtagtagcactttttatgtcttcggaact

SEQ ID NO: 447 - protein, 43 aa, Artificial Sequence
  Description of Artificial Sequence: Synthetic antibody
NRFSGSKSGNTASLTFSGLQAEVEADYYCCSYAGSSTFYVFGT

SEQ ID NO: 448 - DNA, 129 bp, Artificial Sequence
  Description of Artificial Sequence: Synthetic antibody
aatcgcttctctggctccaagtctggcaacacggcctccctgacaatctctgtgctccaggctgatgacgaggctgattattactgctgctcatatgcaggtagtagcaccttttatgtcttcggaact

SEQ ID NO: 449 - protein, 43 aa, Artificial Sequence
  Description of Artificial Sequence: Synthetic antibody
NRFSGSKSGNTASLTISVLQADDEADYYCCSYAGSSTFYVFGT

SEQ ID NO: 450 - DNA, 129 bp, Artificial Sequence
  Description of Artificial Sequence: Synthetic antibody
aatcgcttctctggctccaagtctggcaacacggcctccctgacaatctctgggctccagtctgatgacgaggctgattattactgctgctcatatgcaggtagtagcactttttatgtcttcggaact

SEQ ID NO: 451 - protein, 43 aa, Artificial Sequence
  Description of Artificial Sequence: Synthetic antibody
NRFSGSKSGNTASLTISGLQSDDEADYYCCSYAGSSTFYVFGT

SEQ ID NO: 452 - DNA, 129 bp, Artificial Sequence
  Description of Artificial Sequence: Synthetic antibody
aatcgcttctctggctccaagtctggcaacacggcctccctgacaatctctgggctccaggctgaggacgaggctgattattactgctgctcatatgcaggtagtagcactttttatgtcttcggaact

SEQ ID NO: 453 - protein, 43 aa, Artificial Sequence
  Description of Artificial Sequence: Synthetic antibody
NRFSGSKSGNTASLTISGLQAEDEADYYCCSYAGSSTFYVFGT

SEQ ID NO: 454 - DNA, 129 bp, Artificial Sequence
  Description of Artificial Sequence: Synthetic antibody
aatcgcttctctggctccaagtctggcaacacggcctccctgacaatctctgggctccaggctgaggacgaggctgattattactgctgctcatatgcaggtagtagcactttctatgtcttcggaact

SEQ ID NO: 455 - DNA, 129 bp, Artificial Sequence
  Description of Artificial Sequence: Synthetic antibody
aatcgcttctctggctccaagtctggcaacacggcctccctgacaatctctgggctccaggctgaggacgaggctgattattactgctgctcatatgcaggtagtagcaccttttatgtcttcggaact

SEQ ID NO: 456 - DNA, 129 bp, Artificial Sequence
  Description of Artificial Sequence: Synthetic antibody
aatcacttctctggctccaagtctggcaacacggcctccctgacaatctctgggctccaggctgaggacgaggctgattattactgctgctcatatgcaggtagcagcactttttatgtcttcggaact

SEQ ID NO: 457 - protein, 43 aa, Artificial Sequence
  Description of Artificial Sequence: Synthetic antibody
NHFSGSKSGNTASLTISGLQAEDEADYYCCSYAGSSTFYVFGT

SEQ ID NO: 458 - DNA, 129 bp, Artificial Sequence
  Description of Artificial Sequence: Synthetic antibody
atccgcttctctggctccaagtctggcaacacggcctccctgacaatctctgggctccaggctgaggacgaggctgattattactgctgctcatatgcaggtagtagcactttttatgtcttcggaact

SEQ ID NO: 459 - protein, 43 aa, Artificial Sequence
  Description of Artificial Sequence: Synthetic antibody
IRFSGSKSGNTASLTISGLQAEDEADYYCCSYAGSSTFYVFGT

SEQ ID NO: 460 - DNA, 129 bp, Artificial Sequence
  Description of Artificial Sequence: Synthetic antibody
atccgcttctctggctccaagtctggcaacacggcctccctgacaatctctgggctccaggctgaggacgaggctgattattactgctgctcatatgcaggtagtagcaccttttatgtcttcggaact

SEQ ID NO: 461 - protein, 11 aa, Artificial Sequence
  Description of Artificial Sequence: Synthetic antibody
CSYAGSYTLVF

SEQ ID NO: 462 - DNA, 129 bp, Artificial Sequence
  Description of Artificial Sequence: Synthetic antibody
ctgatccgcttctctggctccaagtctggcaacacggcctccctgaccatctctgggctccaggctgaggatgaggctgattattactgctgctcatatgcaggcagctacactttggtattcggcgga

SEQ ID NO: 463 - protein, 43 aa, Artificial Sequence
  Description of Artificial Sequence: Synthetic antibody
LIRFSGSKSGNTASLTISGLQAEDEADYYCCSYAGSYTLVFGG

SEQ ID NO: 464 - DNA, 129 bp, Artificial Sequence
  Description of Artificial Sequence: Synthetic antibody
ctgatccgcttctctggctccaagtctgacaacacggcctccctgaccatctctgggctccaggctgaggatgaggctgattattactgctgctcatatgcaggcagctacactttggtattcggcgga

SEQ ID NO: 465 - protein, 43 aa, Artificial Sequence
  Description of Artificial Sequence: Synthetic antibody
LIRFSGSKSDNTASLTISGLQAEDEADYYCCSYAGSYTLVFGG

SEQ ID NO: 466 - DNA, 129 bp, Artificial Sequence
  Description of Artificial Sequence: Synthetic antibody
cctgatcgcttctctgtctccaagtctggcaacacggcctcgctgaccatctctgggctccaggctgaggatgaggctgattattactgctgctcatatgcaggcagctacactttggtattcggcgga

SEQ ID NO: 467 - protein, 43 aa, Artificial Sequence
  Description of Artificial Sequence: Synthetic antibody
PDRFSVSKSGNTASLTISGLQAEDEADYYCCSYAGSYTLVFGG

SEQ ID NO: 468 - DNA, 129 bp, Artificial Sequence
  Description of Artificial Sequence: Synthetic antibody
cctgatcgcttctctggctgcaagtctggcaactcggcctccctgaccatctctgggctccaggctgaggatgaggctgattattactgctgctcatatgcaggcagctacactttggtattcggcgga

SEQ ID NO: 469 - protein, 43 aa, Artificial Sequence
  Description of Artificial Sequence: Synthetic antibody
PDRFSGCKSGNSASLTISGLQAEDEADYYCCSYAGSYTLVFGG

SEQ ID NO: 470 - DNA, 129 bp, Artificial Sequence
  Description of Artificial Sequence: Synthetic antibody
cctgatcgcttctctggctccaagtctggcaactctgcctccctgaccatctctgggctccaggctgaggatgaggctgattattactgctgctcatatgcaggcagctacactttggtattcggcgga

SEQ ID NO: 471 - protein, 43 aa, Artificial Sequence
  Description of Artificial Sequence: Synthetic antibody
PDRFSGSKSGNSASLTISGLQAEDEADYYCCSYAGSYTLVFGG

SEQ ID NO: 472 - DNA, 129 bp, Artificial Sequence
  Description of Artificial Sequence: Synthetic antibody
cctgatcgcttctctggctccaagtctggcaactcgggctccctgaccatctctgggctccaggctgaggatgaggctgattattactgctgctcatatgcaggcagctacactttggtattcggcgga

SEQ ID NO: 473 - protein, 43 aa, Artificial Sequence
  Description of Artificial Sequence: Synthetic antibody
PDRFSGSKSGNSGSLTISGLQAEDEADYYCCSYAGSYTLVFGG

SEQ ID NO: 474 - DNA, 129 bp, Artificial Sequence
  Description of Artificial Sequence: Synthetic antibody
cctgatcgcttctctggctccaagtctggcaacactgcctcccagaccatctctggactccaggctgaggatgaggctgattattactgctgctcatatgcaggcagctacactttggtattcggcgga

SEQ ID NO: 475 - protein, 43 aa, Artificial Sequence
  Description of Artificial Sequence: Synthetic antibody
PDRFSGSKSGNTASQTISGLQAEDEADYYCCSYAGSYTLVFGG

SEQ ID NO: 476 - DNA, 129 bp, Artificial Sequence
  Description of Artificial Sequence: Synthetic antibody
cctgatcgcttctctggctccaagtctggcaacacggcctcgctgtccatctctgggctccaggctgaggatgaggctgattattactgctgctcatatgcaggcagctacactttggtattcggcgga

SEQ ID NO: 477 - protein, 43 aa, Artificial Sequence
  Description of Artificial Sequence: Synthetic antibody
PDRFSGSKSGNTASLSISGLQAEDEADYYCCSYAGSYTLVFGG

SEQ ID NO: 478 - DNA, 129 bp, Artificial Sequence
  Description of Artificial Sequence: Synthetic antibody
cctgatcgcttctctggctccaagtctggcaacacggcctccctgaccatctctgggctccaggctgaggatgaggctgattattactgctgctcatatgcaggcagctacactttggtattcggcgga

SEQ ID NO: 479 - protein, 43 aa, Artificial Sequence
  Description of Artificial Sequence: Synthetic antibody
PDRFSGSKSGNTASLTISGLQAEDEADYYCCSYAGSYTLVFGG

SEQ ID NO: 480 - DNA, 129 bp, Artificial Sequence
  Description of Artificial Sequence: Synthetic antibody
cctgatcgcttctctggctccaagtctggcaacacggcctccctgaccatctctggactccaggctgaggatgaggctgattattactgctgctcatatgcaggcagctacactttggtattcggcgga

SEQ ID NO: 481 - DNA, 129 bp, Artificial Sequence
  Description of Artificial Sequence: Synthetic antibody
cctgatcgcttctctggctccaagtctgactactcggcctccctgaccatctctgggctccaggctgaggatgaggctgattattactgctgctcatatgcaggcagctacactttggtattcggcgga

SEQ ID NO: 482 - protein, 43 aa, Artificial Sequence
  Description of Artificial Sequence: Synthetic antibody
PDRFSGSKSDYSASLTISGLQAEDEADYYCCSYAGSYTLVFGG

SEQ ID NO: 483 - DNA, 129 bp, Artificial Sequence
  Description of Artificial Sequence: Synthetic antibody
cctgatcgcttctctggctccaagtctgacaacacggcctccctgaccatctctgggctccaggctgaggatgaggctgattattactgctgctcgtatgcaggcagctatactttggtattcggcgga

SEQ ID NO: 484 - protein, 43 aa, Artificial Sequence
  Description of Artificial Sequence: Synthetic antibody
PDRFSGSKSDNTASLTISGLQAEDEADYYCCSYAGSYTLVFGG

SEQ ID NO: 485 - DNA, 129 bp, Artificial Sequence
  Description of Artificial Sequence: Synthetic antibody
cctgatcgcttctctggctccaagtctgacaacacggcctccctgaccatctctgggctccaggctgaggatgaggctgattattactgctgctcatatgcaggcagctacactttggtattcggcgga

SEQ ID NO: 486 - DNA, 129 bp, Artificial Sequence
  Description of Artificial Sequence: Synthetic antibody
ccgcttcgcttctctggctccaagtctggcaacacggcctccctgaccatctctgggctccaggctgaggatgaggctgattattactgctgctcatatgcaggcagctacactttggtattcggcgga

SEQ ID NO: 487 - protein, 43 aa, Artificial Sequence
  Description of Artificial Sequence: Synthetic antibody
PLRFSGSKSGNTASLTISGLQAEDEADYYCCSYAGSYTLVFGG

SEQ ID NO: 488 - DNA, 129 bp, Artificial Sequence
  Description of Artificial Sequence: Synthetic antibody
ccgcatcgcttctctggctccaagtctgacaacacggcctccctgaccatctctgggctccaggctgaggatgaggctgattattactgctgctcatatgcaggcagctacactttggtattcggcgga

SEQ ID NO: 489 - protein, 43 aa, Artificial Sequence
  Description of Artificial Sequence: Synthetic antibody
PHRFSGSKSDNTASLTISGLQAEDEADYYCCSYAGSYTLVFGG

SEQ ID NO: 490 - DNA, 129 bp, Artificial Sequence
  Description of Artificial Sequence: Synthetic antibody
cagtttcgcttctctggctccaagtctggcaacacggcctccctgaccatctctgggctccaggctgaggatgaggctgattattactgctgctcatatgcaggcagctacactttggtattcggcgga

SEQ ID NO: 491 - protein, 43 aa, Artificial Sequence
  Description of Artificial Sequence: Synthetic antibody
QFRFSGSKSGNTASLTISGLQAEDEADYYCCSYAGSYTLVFGG

SEQ ID NO: 492 - DNA, 129 bp, Artificial Sequence
  Description of Artificial Sequence: Synthetic antibody
cagttccgcttctctggctccaagtctgacaacacggcctccctgaccatctctgggctccaggctgaggatgaggctgattattactgctgctcatatgcaggcagctacactttggtattcggcgga

SEQ ID NO: 493 - protein, 43 aa, Artificial Sequence
  Description of Artificial Sequence: Synthetic antibody
QFRFSGSKSDNTASLTISGLQAEDEADYYCCSYAGSYTLVFGG

SEQ ID NO: 494 - protein, 6 aa, Artificial Sequence
  Description of Artificial Sequence: Synthetic antibody
CSFRVF

SEQ ID NO: 495 - DNA, 129 bp, Artificial Sequence
  Description of Artificial Sequence: Synthetic antibody
cgtccctcagtggtttctaatcgcttctctggctccaagtctgtcaacacggcctccctgacaatctctgggctccaggctgaggacgaggctgattattactgctgctcatttagggtcttcggaact

SEQ ID NO: 496 - protein, 43 aa, Artificial Sequence
  Description of Artificial Sequence: Synthetic antibody
RPSVVSNRFSGSKSVNTASLTISGLQAEDEADYYCCSFRVFGT

SEQ ID NO: 497 - DNA, 129 bp, Artificial Sequence
  Description of Artificial Sequence: Synthetic antibody
cggccctcaggggtttcttatcgcttctctggctccaagtctggcaactcggcctccctgacaatctctgggctccaggctgaggacgaggctgattattactgctgctcatttagggtcttcggaact

SEQ ID NO: 498 - protein, 43 aa, Artificial Sequence
  Description of Artificial Sequence: Synthetic antibody
RPSGVSYRFSGSKSGNSASLTISGLQAEDEADYYCCSFRVFGT

SEQ ID NO: 499 - DNA, 129 bp, Artificial Sequence
  Description of Artificial Sequence: Synthetic antibody
cggccctcaggggtttcttatcgcttctctggctccaagtctcgcaacacggcctccctgacaatctctgggctccaggctgaggacgaggctgattattactgctgctcatttagggtcttcggaact

SEQ ID NO: 500 - protein, 43 aa, Artificial Sequence
  Description of Artificial Sequence: Synthetic antibody
RPSGVSYRFSGSKSRNTASLTISGLQAEDEADYYCCSFRVFGT

SEQ ID NO: 501 - DNA, 129 bp, Artificial Sequence
  Description of Artificial Sequence: Synthetic antibody
cggccctcaggggtttctaatcgcttctctgtctccaagtctgtcaacacggcctccctgacaatctctgggctccaggctgaggacgaggctgattattactgctgctcatttagggtcttcggaact

SEQ ID NO: 502 - protein, 43 aa, Artificial Sequence
  Description of Artificial Sequence: Synthetic antibody
RPSGVSNRFSVSKSVNTASLTISGLQAEDEADYYCCSFRVFGT

SEQ ID NO: 503 - DNA, 129 bp, Artificial Sequence
  Description of Artificial Sequence: Synthetic antibody
cggccctcaggggtttctaatcgcttctctggctccaagtctggcatcacggcctccctgacaatctctgggctccaggctgaggacgaggctgattattactgctgctcatttagggtcttcggatct

SEQ ID NO: 504 - protein, 43 aa, Artificial Sequence
  Description of Artificial Sequence: Synthetic antibody
RPSGVSNRFSGSKSGITASLTISGLQAEDEADYYCCSFRVFGS

SEQ ID NO: 505 - DNA, 129 bp, Artificial Sequence
  Description of Artificial Sequence: Synthetic antibody
cggccctcaggggtttctaatcgcttctctggctccaagtctggcaacacggcctccctgacaatctctgggctccaggctgaggacgaggctgattattactgctgctcatttagggtcttcggaact

SEQ ID NO: 506 - protein, 43 aa, Artificial Sequence
  Description of Artificial Sequence: Synthetic antibody
RPSGVSNRFSGSKSGNTASLTISGLQAEDEADYYCCSFRVFGT

SEQ ID NO: 507 - DNA, 129 bp, Artificial Sequence
  Description of Artificial Sequence: Synthetic antibody
cggccctcaggggtttctaatcgcttctctggccccaagtctggcaacacggcctccctgacaatctctgggctccaggctgaggacgaagctgattattactgctgctcatttagggtcttcggaact

SEQ ID NO: 508 - protein, 43 aa, Artificial Sequence
  Description of Artificial Sequence: Synthetic antibody
RPSGVSNRFSGPKSGNTASLTISGLQAEDEADYYCCSFRVFGT

SEQ ID NO: 509 - DNA, 129 bp, Artificial Sequence
  Description of Artificial Sequence: Synthetic antibody
cggccctcaggggtctctaatcgcttctctggctccaagtctggcaacacggcctccctgacaacctctgggctccaggctgaggacgaggctgattattactgctgctcatttagggtcttcggaact

SEQ ID NO: 510 - protein, 43 aa, Artificial Sequence
  Description of Artificial Sequence: Synthetic antibody
RPSGVSNRFSGSKSGNTASLTTSGLQAEDEADYYCCSFRVFGT

SEQ ID NO: 511 - DNA, 129 bp, Artificial Sequence
  Description of Artificial Sequence: Synthetic antibody
aggccctcaggggtttctaatcgcttctctggctccaagtctggcaacacggcctccctgacattctctgggctccaggctgaggacgaggctgattattactgctgctcatttagggtcttcggaact

SEQ ID NO: 512 - protein, 43 aa, Artificial Sequence
  Description of Artificial Sequence: Synthetic antibody
RPSGVSNRFSGSKSGNTASLTFSGLQAEDEADYYCCSFRVFGT

SEQ ID NO: 513 - DNA, 129 bp, Artificial Sequence
  Description of Artificial Sequence: Synthetic antibody
ggccctcaggggtttctaatccgcttctctggctccaagtctggcaacacggcctccctgacaatctctgggctccaggctgaggacgaggctgattattactgctgctcatttagggtcttcggaact

SEQ ID NO: 514 - protein, 43 aa, Artificial Sequence
  Description of Artificial Sequence: Synthetic antibody
GPQGFLIRFSGSKSGNTASLTISGLQAEDEADYYCCSFRVFGT

SEQ ID NO: 515 - DNA, 129 bp, Artificial Sequence
  Description of Artificial Sequence: Synthetic antibody
ggccctcagggggttctaatacgcttctctggctccaagtctggcaacacggcctccctgacaatctctgggctccaggctgaggacgaggctgattattactgctgctcatttagggtcttcggaact

SEQ ID NO: 516 - protein, 43 aa, Artificial Sequence
  Description of Artificial Sequence: Synthetic antibody
GPQGVLIRFSGSKSGNTASLTISGLQAEDEADYYCCSFRVFGT

SEQ ID NO: 517 - DNA, 129 bp, Artificial Sequence
  Description of Artificial Sequence: Synthetic antibody
cggccctcaggggtttctaatcgcttctctggctccaagtctggcaacacggcctccctgacaatctctgggctccaggctgaggacgaggctgattattcctgctgctcatttagggtcttcggaact

SEQ ID NO: 518 - protein, 43 aa, Artificial Sequence
  Description of Artificial Sequence: Synthetic antibody
RPSGVSNRFSGSKSGNTASLTISGLQAEDEADYSCCSFRVFGT

SEQ ID NO: 519 - DNA, 129 bp, Artificial Sequence
  Description of Artificial Sequence: Synthetic antibody
gcggcctcaggggtttctaatcgcttctctggctccaagtctggcaacacggcctccctgacaatctctgggctccaggctgaggacgaggctgattattactgctgctcatttagggtcttcggaact

SEQ ID NO: 520 - protein, 43 aa, Artificial Sequence
  Description of Artificial Sequence: Synthetic antibody
AASGVSNRFSGSKSGNTASLTISGLQAEDEADYYCCSFRVFGT

SEQ ID NO: 521 - DNA, 129 bp, Artificial Sequence
  Description of Artificial Sequence: Synthetic antibody
gcggccctcagggtttctaatcgcttctctggctccaagtctggcaacacggcctccctgacaatctctgggctccaggctgaggacgaggctgattattactgctgctcatttagggtcttcggaact

SEQ ID NO: 522 - protein, 43 aa, Artificial Sequence
  Description of Artificial Sequence: Synthetic antibody
AALRVSNRFSGSKSGNTASLTISGLQAEDEADYYCCSFRVFGT

SEQ ID NO: 523 - DNA, 129 bp, Artificial Sequence
  Description of Artificial Sequence: Synthetic antibody
gcggccctcaggggtttctatcgcttctctggctccaagtctggcaacacggcctccctgacaatctctgggctccaggctgaggacgaggctgattattactgctgctcatttagggtcttcggaact

SEQ ID NO: 524 - protein, 43 aa, Artificial Sequence
  Description of Artificial Sequence: Synthetic antibody
AALRGFYRFSGSKSGNTASLTISGLQAEDEADYYCCSFRVFGT

SEQ ID NO: 525 - DNA, 129 bp, Artificial Sequence
  Description of Artificial Sequence: Synthetic antibody
agcggccctcaggggtttaatcgcttctctggctccaagtctggcaacacggcctccctgacaatctctgggctccaggctgaggacgaggctgattattactgctgctcatttagggtcttcggaact

SEQ ID NO: 526 - protein, 43 aa, Artificial Sequence
  Description of Artificial Sequence: Synthetic antibody
SGPQGFNRFSGSKSGNTASLTISGLQAEDEADYYCCSFRVFGT

SEQ ID NO: 527 - protein, 11 aa, Artificial Sequence
  Description of Artificial Sequence: Synthetic antibody
CSYAGSSTWVF

SEQ ID NO: 528 - DNA, 129 bp, Artificial Sequence
  Description of Artificial Sequence: Synthetic antibody
tgtaatcgcgtctctggctccaagtctggcaacacggcctccctgacaatctctgggctccaggctgaggacgaggctgattattactgctgctcatatgcaggtagtagcacttgggtgttcggcgga

SEQ ID NO: 529 - protein, 43 aa, Artificial Sequence
  Description of Artificial Sequence: Synthetic antibody
CNRVSGSKSGNTASLTISGLQAEDEADYYCCSYAGSSTWVFGG

SEQ ID NO: 530 - DNA, 129 bp, Artificial Sequence
  Description of Artificial Sequence: Synthetic antibody
tcttatcgcttctctggctccaagtctggcaactcggcctccctgacaatctctgggctccaggctgaggacgaggctgattattactgctgctcatatgcaggtagtagcacttgggtgttcggcgga

SEQ ID NO: 531 - protein, 43 aa, Artificial Sequence
  Description of Artificial Sequence: Synthetic antibody
SYRFSGSKSGNSASLTISGLQAEDEADYYCCSYAGSSTWVFGG

SEQ ID NO: 532 - DNA, 129 bp, Artificial Sequence
  Description of Artificial Sequence: Synthetic antibody
tcttatcgcttctctggctccaagtctggcaacacggcctccctgactatctctgggctccaggctgaggacgaggctgattattactgctgctcatatgcaggtagtagcacttgggtgttcggcgga

SEQ ID NO: 533 - protein, 43 aa, Artificial Sequence
  Description of Artificial Sequence: Synthetic antibody
SYRFSGSKSGNTASLTISGLQAEDEADYYCCSYAGSSTWVFGG

SEQ ID NO: 534 - DNA, 129 bp, Artificial Sequence
  Description of Artificial Sequence: Synthetic antibody
tctattcgcttctctggctccaagtctggcatcacggcctccctgacaatctctgggctccaggctgaggacgaggctgattattactgctgctcatatgcaggtagtagcacttgggtgttcggcgga

SEQ ID NO: 535 - protein, 43 aa, Artificial Sequence
  Description of Artificial Sequence: Synthetic antibody
SIRFSGSKSGITASLTISGLQAEDEADYYCCSYAGSSTWVFGG

SEQ ID NO: 536 - DNA, 129 bp, Artificial Sequence
  Description of Artificial Sequence: Synthetic antibody
tctagtcgcttctctggctccaagtctggcaacacggcctccctgacaatctccgggctccaggctgaggacgaggctgattattactgctgctcatatgcaggtagtagcacttgggtgttcggcgga

SEQ ID NO: 537 - protein, 43 aa, Artificial Sequence
  Description of Artificial Sequence: Synthetic antibody
SSRFSGSKSGNTASLTISGLQAEDEADYYCCSYAGSSTWVFGG

SEQ ID NO: 538 - DNA, 129 bp, Artificial Sequence
  Description of Artificial Sequence: Synthetic antibody
tctaatcgcttctctggctcgaagtctggcaacacggcctccctgacattctctgggctccaggctgaggacgaggctgattattactgctgctcatatgcaggtagtagcacttgggtgttcggcgga

SEQ ID NO: 539 - protein, 43 aa, Artificial Sequence
  Description of Artificial Sequence: Synthetic antibody
SNRFSGSKSGNTASLTFSGLQAEDEADYYCCSYAGSSTWVFGG

SEQ ID NO: 540 - DNA, 129 bp, Artificial Sequence
  Description of Artificial Sequence: Synthetic antibody
tctaatcgcttctctggctccatgtctggcatcacggcctccctgacaatctctgggctccaggctgaggacgaggctgattattactgctgctcatatgcaggtagtagcacttgggtgttcggcgga

SEQ ID NO: 541 - protein, 43 aa, Artificial Sequence
  Description of Artificial Sequence: Synthetic antibody
SNRFSGSMSGITASLTISGLQAEDEADYYCCSYAGSSTWVFGG

SEQ ID NO: 542 - DNA, 129 bp, Artificial Sequence
  Description of Artificial Sequence: Synthetic antibody
tctaatcgcttctctggctccaagtctgggaactcggcctccctgacaatctctgggctccaggctgaggacgaggctgattattactgctgctcatatgcaggtagtagcacttgggtgttcggcgga

SEQ ID NO: 543 - protein, 43 aa, Artificial Sequence
  Description of Artificial Sequence: Synthetic antibody
SNRFSGSKSGNSASLTISGLQAEDEADYYCCSYAGSSTWVFGG

SEQ ID NO: 544 - DNA, 129 bp, Artificial Sequence
  Description of Artificial Sequence: Synthetic antibody
tctaatcgcttctctggctccaagtctggctacacggcctccctgactatctctgggctccaggctgaggacgaggctgattattactgctgctcatatgcaggtagtagcacttgggtgttcggcgga

SEQ ID NO: 545 - protein, 43 aa, Artificial Sequence
  Description of Artificial Sequence: Synthetic antibody
SNRFSGSKSGYTASLTISGLQAEDEADYYCCSYAGSSTWVFGG

SEQ ID NO: 546 - DNA, 129 bp, Artificial Sequence
  Description of Artificial Sequence: Synthetic antibody
tctaatcgcttctctggctccaagtctggcatcacggcctccctgactatctctgggctccaggctgaggacgaggctgattattactgctgctcatatgcaggtagtagcacttgggtgttcggcgga

SEQ ID NO: 547 - protein, 43 aa, Artificial Sequence
  Description of Artificial Sequence: Synthetic antibody
SNRFSGSKSGITASLTISGLQAEDEADYYCCSYAGSSTWVFGG

SEQ ID NO: 548 - DNA, 129 bp, Artificial Sequence
  Description of Artificial Sequence: Synthetic antibody
tctaatcgcttctctggctccaagtctggcaagacggcctccctgagaatctctgggctccaggctgaggacgaggctgattattactgctgctcatatgcaggtagtagcacttgggtgttcggcgga

SEQ ID NO: 549 - protein, 43 aa, Artificial Sequence
  Description of Artificial Sequence: Synthetic antibody
SNRFSGSKSGKTASLRISGLQAEDEADYYCCSYAGSSTWVFGG

SEQ ID NO: 550 - DNA, 129 bp, Artificial Sequence
  Description of Artificial Sequence: Synthetic antibody
tctaatcgcttctctggctccaagtctggcaactcggcctccctgagaatctctgggctccaggctgaggacgaggctgattattactgctgctcatatgcaggtagtagcacttgggtgttcggcgga

SEQ ID NO: 551 - protein, 43 aa, Artificial Sequence
  Description of Artificial Sequence: Synthetic antibody
SNRFSGSKSGNSASLRISGLQAEDEADYYCCSYAGSSTWVFGG

SEQ ID NO: 552 - DNA, 129 bp, Artificial Sequence
  Description of Artificial Sequence: Synthetic antibody
tctaatcgcttctctggctccaagtctggcaacacggcctccctgacaatctctgggctccaggctgaggacgaggctgattattactgctgctcatatgcaggtagtagcacttgggtgttcggcgga

SEQ ID NO: 553 - protein, 43 aa, Artificial Sequence
  Description of Artificial Sequence: Synthetic antibody
SNRFSGSKSGNTASLTISGLQAEDEADYYCCSYAGSSTWVFGG

SEQ ID NO: 554 - DNA, 129 bp, Artificial Sequence
  Description of Artificial Sequence: Synthetic antibody
ctaatccgcttctctggctccaagtctggcaacacggcctccctgacaatctctgggctccaggctgaggacgaggctgattattactgctgctcatatgcaggtagtagcacttgggtgttcggcgga

SEQ ID NO: 555 - protein, 43 aa, Artificial Sequence
  Description of Artificial Sequence: Synthetic antibody
LIRFSGSKSGNTASLTISGLQAEDEADYYCCSYAGSSTWVFGG

SEQ ID NO: 556 - DNA, 129 bp, Artificial Sequence
  Description of Artificial Sequence: Synthetic antibody
tctaatcgcttctctggctccaagtctggcaacacggcctccctgacaatctctgggctccaggctgaggacgaggctgattattactgctgttcatatgcaggtagtagcacttgggtgttcggcgga

SEQ ID NO: 557 - protein, 11 aa, Artificial Sequence
  Description of Artificial Sequence: Synthetic antibody
CSYAGSSTCVF

SEQ ID NO: 558 - DNA, 129 bp, Artificial Sequence
  Description of Artificial Sequence: Synthetic antibody
ttctatcgcttctctggctccaagtctggcaacacggcctccctgacaatctctgggctccaggctgaggacgaggctgattattactgctgctcatatgcaggtagtagcacttgcgtcttcggaact

SEQ ID NO: 559 - protein, 43 aa, Artificial Sequence
  Description of Artificial Sequence: Synthetic antibody
FYRFSGSKSGNTASLTISGLQAEDEADYYCCSYAGSSTCVFGT

SEQ ID NO: 560 - DNA, 129 bp, Artificial Sequence
  Description of Artificial Sequence: Synthetic antibody
tgcaatcgcttctctggctccaagtctggcaacacggcctccctgacaatctctgggctccaggctgaggacgaggctgattattactgctgctcatatgcaggtagtagcacttgcgtcttcggaact

SEQ ID NO: 561 - protein, 43 aa, Artificial Sequence
  Description of Artificial Sequence: Synthetic antibody
CNRFSGSKSGNTASLTISGLQAEDEADYYCCSYAGSSTCVFGT

SEQ ID NO: 562 - DNA, 129 bp, Artificial Sequence
  Description of Artificial Sequence: Synthetic antibody
tctaatcgcttctctggctccatgtctggcaacacggcgtccctgacaatctctgggctccaggctgaggacgaggctgattattactgctgctcatatgcaggtagtagcacttgcgtcttcggaact

SEQ ID NO: 563 - protein, 43 aa, Artificial Sequence
  Description of Artificial Sequence: Synthetic antibody
SNRFSGSMSGNTASLTISGLQAEDEADYYCCSYAGSSTCVFGT

SEQ ID NO: 564 - DNA, 129 bp, Artificial Sequence
  Description of Artificial Sequence: Synthetic antibody
tctaatcgcttctctggctccaagtctggcaagacggcctccctgactatctctgggctccaggctgaggacgaggctgattattactgctgctcatatgcaggtagtagcacttgtgtcttcggaact

SEQ ID NO: 565 - protein, 43 aa, Artificial Sequence
  Description of Artificial Sequence: Synthetic antibody
SNRFSGSKSGKTASLTISGLQAEDEADYYCCSYAGSSTCVFGT

SEQ ID NO: 566 - DNA, 129 bp, Artificial Sequence
  Description of Artificial Sequence: Synthetic antibody
tctaatcgcttctctggctccaagtctggcaactcgtcctccctgacaatctctgggctccaggctgaggacgaggctgattattactgctgctcatatgcaggtagtagcacttgtgtcttcggaact

SEQ ID NO: 567 - protein, 43 aa, Artificial Sequence
  Description of Artificial Sequence: Synthetic antibody
SNRFSGSKSGNSSSLTISGLQAEDEADYYCCSYAGSSTCVFGT

SEQ ID NO: 568 - DNA, 129 bp, Artificial Sequence
  Description of Artificial Sequence: Synthetic antibody
tctaatcgcttctctggctccaagtctggcaactcggcctccctgagaatctctgggctccaggctgaggacgaggctgattattactgctgctcatatgcaggtagtagcacttgcgtcttcggaact

SEQ ID NO: 569 - protein, 43 aa, Artificial Sequence
  Description of Artificial Sequence: Synthetic antibody
SNRFSGSKSGNSASLRISGLQAEDEADYYCCSYAGSSTCVFGT

SEQ ID NO: 570 - DNA, 129 bp, Artificial Sequence
  Description of Artificial Sequence: Synthetic antibody
tctaatcgcttctctggctccaagtctggcaactcggcctccctgactatctctgggctccaggctgaggacgaggctgattattactgctgctcatatgcaggtagtagcacttgcgtcttcggaact

SEQ ID NO: 571 - protein, 43 aa, Artificial Sequence
  Description of Artificial Sequence: Synthetic antibody
SNRFSGSKSGNSASLTISGLQAEDEADYYCCSYAGSSTCVFGT

SEQ ID NO: 572 - DNA, 129 bp, Artificial Sequence
  Description of Artificial Sequence: Synthetic antibody
tctaatcgcttctctggctccaagtctggcaactcggcctccctgacaatctcttggctccaggctgaggacgaggctgattattactgctgctcatatgcaggtagtagcacttgtgtcttcggaact

SEQ ID NO: 573 - protein, 43 aa, Artificial Sequence
  Description of Artificial Sequence: Synthetic antibody
SNRFSGSKSGNSASLTISWLQAEDEADYYCCSYAGSSTCVFGT

SEQ ID NO: 574 - DNA, 129 bp, Artificial Sequence
  Description of Artificial Sequence: Synthetic antibody
tctaatcgcttctctggctccaagtctggcaacacggcctccctgacaatctctgggctccaggctgaggacgaggctgattattactgctgctcatatgcaggtagtagcacttgtgtcttcggaact

SEQ ID NO: 575 - protein, 43 aa, Artificial Sequence
  Description of Artificial Sequence: Synthetic antibody
SNRFSGSKSGNTASLTISGLQAEDEADYYCCSYAGSSTCVFGT

SEQ ID NO: 576 - DNA, 129 bp, Artificial Sequence
  Description of Artificial Sequence: Synthetic antibody
tctaatcgcttctctggctccaagtctggcaacacggcctccctgacaatctctgggctccaggctgaggacgaggctgattattactgctgctcatatgcaggtagtagcacttgcgtcttcggaact

SEQ ID NO: 577 - DNA, 129 bp, Artificial Sequence
  Description of Artificial Sequence: Synthetic antibody
tctaatcgcttctctggctccaagtctggcaacacggcctacctgacaatctctgggctccagtctgaggacgaggctgattattactgctgctcatatgcaggtagtagcacttgtgtcttcggaact

SEQ ID NO: 578 - protein, 43 aa, Artificial Sequence
  Description of Artificial Sequence: Synthetic antibody
SNRFSGSKSGNTAYLTISGLQSEDEADYYCCSYAGSSTCVFGT

SEQ ID NO: 579 - DNA, 129 bp, Artificial Sequence
  Description of Artificial Sequence: Synthetic antibody
tctaatcgcatctctggctccaagtctggcaacacggcctcccagacaatctctgggctccaggctgaggacgaggctgattattactgctgctcatatgcaggtagtagcacttgcgtcttcggaact

SEQ ID NO: 580 - protein, 43 aa, Artificial Sequence
  Description of Artificial Sequence: Synthetic antibody
SNRISGSKSGNTASQTISGLQAEDEADYYCCSYAGSSTCVFGT

SEQ ID NO: 581 - DNA, 129 bp, Artificial Sequence
  Description of Artificial Sequence: Synthetic antibody
ctaatccgcttctctggctccaagtctggcaacacggcctccctgacaatctctgggctccaggctgaggacgaggctgattattactgctgctcatatgcaggtagtagcacttgtgtcttcggaact

SEQ ID NO: 582 - protein, 43 aa, Artificial Sequence
  Description of Artificial Sequence: Synthetic antibody
LIRFSGSKSGNTASLTISGLQAEDEADYYCCSYAGSSTCVFGT

SEQ ID NO: 583 - DNA, 129 bp, Artificial Sequence
  Description of Artificial Sequence: Synthetic antibody
ctaatccgcttctctggctccaagtctggcaacacggcctccctgacaatctctgggctccaggctgaggacgaggctgattattactgctgctcatatgcaggtagtagcacttgcgtcttcggaact

SEQ ID NO: 584 - DNA, 129 bp, Artificial Sequence
  Description of Artificial Sequence: Synthetic antibody
ttctatcgcttctctggctccaagtctggcaacacggcctccctgacaatctctgggctccaggctgaggacgaggctgattattactgctgctcatatgcaggtagtagcactttcgtcttcggaact

SEQ ID NO: 585 - protein, 43 aa, Artificial Sequence
  Description of Artificial Sequence: Synthetic antibody
FYRFSGSKSGNTASLTISGLQAEDEADYYCCSYAGSSTFVFGT

SEQ ID NO: 586 - DNA, 129 bp, Artificial Sequence
  Description of Artificial Sequence: Synthetic antibody
tctagtcgctcctctggctccaagtctggcaacacggcctccctgacaatctctgggctccaggctgaggacgaggctgattattactgctgctcatatgcaggtagtagcactttcgtcttcggaact

SEQ ID NO: 587 - protein, 43 aa, Artificial Sequence
  Description of Artificial Sequence: Synthetic antibody
SSRSSGSKSGNTASLTISGLQAEDEADYYCCSYAGSSTFVFGT

SEQ ID NO: 588 - DNA, 129 bp, Artificial Sequence
  Description of Artificial Sequence: Synthetic antibody
tctaatggcttctctggctccaagtctggcaacacggcctccctgacaatctctgggctccagtctgaggacgaggctgattattactgctgctcatatgcaggtagtagcactttcgtcttcggaact

SEQ ID NO: 589 - protein, 43 aa, Artificial Sequence
  Description of Artificial Sequence: Synthetic antibody
SNGFSGSKSGNTASLTISGLQSEDEADYYCCSYAGSSTFVFGT

SEQ ID NO: 590 - DNA, 129 bp, Artificial Sequence
  Description of Artificial Sequence: Synthetic antibody
tctaatcgcttctctggctccaagtctggcatctcggcctccctgacaatctctgggctccaggctgaggacgaggctgattattactgctgctcatatgcaggtagtagcactttcgtcttcggaact

SEQ ID NO: 591 - protein, 43 aa, Artificial Sequence
  Description of Artificial Sequence: Synthetic antibody
SNRFSGSKSGISASLTISGLQAEDEADYYCCSYAGSSTFVFGT

SEQ ID NO: 592 - DNA, 129 bp, Artificial Sequence
  Description of Artificial Sequence: Synthetic antibody
tctaatcgcttctctggctccaagtctggcatcacggcctccctgacaatctctgtgctccaggctgaggacgaggctgattattactgctgctcatatgcaggtagtagcactttcgtcttcggaact

SEQ ID NO: 593 - protein, 43 aa, Artificial Sequence
  Description of Artificial Sequence: Synthetic antibody
SNRFSGSKSGITASLTISVLQAEDEADYYCCSYAGSSTFVFGT

SEQ ID NO: 594 - DNA, 129 bp, Artificial Sequence
  Description of Artificial Sequence: Synthetic antibody
tctaatcgcttctctggctccaagtctggcatcacggcctccctgacaatctctgggctcgaggctgaggacgaggctgattattactgctgctcatatgcaggtagtagcactttcgtcttcggaact

SEQ ID NO: 595 - protein, 43 aa, Artificial Sequence
  Description of Artificial Sequence: Synthetic antibody
SNRFSGSKSGITASLTISGLEAEDEADYYCCSYAGSSTFVFGT

SEQ ID NO: 596 - DNA, 129 bp, Artificial Sequence
  Description of Artificial Sequence: Synthetic antibody
tctaatcgcttctctggctccaagtctggcaacactgcctacctgacaatctctgggctccaggctgaggacgaggctgattattactgctgctcatatgcaggtagtagcactttcgtcttcggaact

SEQ ID NO: 597 - protein, 43 aa, Artificial Sequence
  Description of Artificial Sequence: Synthetic antibody
SNRFSGSKSGNTAYLTISGLQAEDEADYYCCSYAGSSTFVFGT

SEQ ID NO: 598 - DNA, 129 bp, Artificial Sequence
  Description of Artificial Sequence: Synthetic antibody
tctaatcgcttctctggctccaagtctggcaacacggcctccctgtcaatctctgggctccaggctgaggacgaggctgattactactgctgctcatatgcgggtagtagcactttcgtcttcggaact

SEQ ID NO: 599 - protein, 43 aa, Artificial Sequence
  Description of Artificial Sequence: Synthetic antibody
SNRFSGSKSGNTASLSISGLQAEDEADYYCCSYAGSSTFVFGT

SEQ ID NO: 600 - DNA, 129 bp, Artificial Sequence
  Description of Artificial Sequence: Synthetic antibody
tctaatcgcttctctggctccaagtctggcaacacggcctccctgacaatctctgggctccaggctgaggacgaggctgattattactgctgctcatatgcaggtagtagcacttttgtcttcggatct

SEQ ID NO: 601 - protein, 43 aa, Artificial Sequence
  Description of Artificial Sequence: Synthetic antibody
SNRFSGSKSGNTASLTISGLQAEDEADYYCCSYAGSSTFVFGS

SEQ ID NO: 602 - DNA, 129 bp, Artificial Sequence
  Description of Artificial Sequence: Synthetic antibody
tctaatcgcttctctggctccaagtctggcaacacggcctccctgacaatctctgggctccaggctgaggacgaggctgattattactgctgctcatatgcaggtagtagcactttcgtcttcggaact

SEQ ID NO: 603 - protein, 43 aa, Artificial Sequence
  Description of Artificial Sequence: Synthetic antibody
SNRFSGSKSGNTASLTISGLQAEDEADYYCCSYAGSSTFVFGT

SEQ ID NO: 604 - DNA, 129 bp, Artificial Sequence
  Description of Artificial Sequence: Synthetic antibody
tctaatcgcttctctggctccaagtctggcaacacggcctccctgacaatctctgggctccaggctgaggacgaggctgattattactgctgctcatatgcaggtagcagcactttcgtcttcggagct

SEQ ID NO: 605 - protein, 43 aa, Artificial Sequence
  Description of Artificial Sequence: Synthetic antibody
SNRFSGSKSGNTASLTISGLQAEDEADYYCCSYAGSSTFVFGA

SEQ ID NO: 606 - DNA, 129 bp, Artificial Sequence
  Description of Artificial Sequence: Synthetic antibody
tctaatcgcttctctggctccaagtctggcaacacggcctcccagacaatctcagggctccaggctgaggacgaggctgattattactgctgctcatatgcaggtagtagcactttcgtcttcggaact

SEQ ID NO: 607 - protein, 43 aa, Artificial Sequence
  Description of Artificial Sequence: Synthetic antibody
SNRFSGSKSGNTASQTISGLQAEDEADYYCCSYAGSSTFVFGT

SEQ ID NO: 608 - DNA, 129 bp, Artificial Sequence
  Description of Artificial Sequence: Synthetic antibody
tctaatcgcttctccggccccaagtctggcaacacggcctccctgacaatctctgggctccaggctgaggacgaggctgattattactgctgctcatatgcaggtagtagcactttcgtcttcggaact

SEQ ID NO: 609 - protein, 43 aa, Artificial Sequence
  Description of Artificial Sequence: Synthetic antibody
SNRFSGPKSGNTASLTISGLQAEDEADYYCCSYAGSSTFVFGT

SEQ ID NO: 610 - DNA, 129 bp, Artificial Sequence
  Description of Artificial Sequence: Synthetic antibody
ctaatccgcttctctggctccaagtctggcaacacggcctccctgacaatctctgggctccaggctgaggacgaggctgattattactgctgctcatatgcaggtagtagcactttcgtcttcggaact

SEQ ID NO: 611 - protein, 43 aa, Artificial Sequence
  Description of Artificial Sequence: Synthetic antibody
LIRFSGSKSGNTASLTISGLQAEDEADYYCCSYAGSSTFVFGT

SEQ ID NO: 612 - protein, 11 aa, Artificial Sequence
  Description of Artificial Sequence: Synthetic antibody
CSYAGSYSYVF

SEQ ID NO: 613 - DNA, 129 bp, Artificial Sequence
  Description of Artificial Sequence: Synthetic antibody
ctgctacgcttctctggctccaagtctggcaacacggcctccctgaccatctctgggctccaggctgaggatgaggctgattattactgctgctcatatgcaggcagctactcttatgtcttcggaact

SEQ ID NO: 614 - protein, 43 aa, Artificial Sequence
  Description of Artificial Sequence: Synthetic antibody
LLRFSGSKSGNTASLTISGLQAEDEADYYCCSYAGSYSYVFGT

SEQ ID NO: 615 - DNA, 129 bp, Artificial Sequence
  Description of Artificial Sequence: Synthetic antibody
ctgatccgcttctctggctccaagtctggcaacacggcctccctgaccatctctgggctccaggctgaggatgaggctgattattactgctgctcatatgcaggcagctactcttatgtcttcggaact

SEQ ID NO: 616 - protein, 43 aa, Artificial Sequence
  Description of Artificial Sequence: Synthetic antibody
LIRFSGSKSGNTASLTISGLQAEDEADYYCCSYAGSYSYVFGT

SEQ ID NO: 617 - DNA, 129 bp, Artificial Sequence
  Description of Artificial Sequence: Synthetic antibody
cctgatcgcttctctggctgcaagtctggcatcacggcctccctgaccatctctgggctccaggctgaggatgaggctgattattactgctgctcatatgcaggcagctactcttatgtcttcggaact

SEQ ID NO: 618 - protein, 43 aa, Artificial Sequence
  Description of Artificial Sequence: Synthetic antibody
PDRFSGCKSGITASLTISGLQAEDEADYYCCSYAGSYSYVFGT

SEQ ID NO: 619 - DNA, 129 bp, Artificial Sequence
  Description of Artificial Sequence: Synthetic antibody
cctgatcgcttctctggctcgaagtctggcaacacgtcctccctgaccatctctgggctccaggctgaggatgaggctgattattactgctgctcatatgcaggcagctactcttatgtcttcggaact

SEQ ID NO: 620 - protein, 43 aa, Artificial Sequence
  Description of Artificial Sequence: Synthetic antibody
PDRFSGSKSGNTSSLTISGLQAEDEADYYCCSYAGSYSYVFGT

SEQ ID NO: 621 - DNA, 129 bp, Artificial Sequence
  Description of Artificial Sequence: Synthetic antibody
cctgatcgcttctctggctccaagtcttgcaacacggcctccctgaccatctctgggctccaggctgaggatgaggctgattattactgctgctcatatgcaggcagctacagttatgtcttcggaact

SEQ ID NO: 622 - protein, 43 aa, Artificial Sequence
  Description of Artificial Sequence: Synthetic antibody
PDRFSGSKSCNTASLTISGLQAEDEADYYCCSYAGSYSYVFGT

SEQ ID NO: 623 - DNA, 129 bp, Artificial Sequence
  Description of Artificial Sequence: Synthetic antibody
cctgatcgcttctctggctccaagtctggcatcacggcctccctgaccatctctgtgctccaggctgaggatgaggctgattattactgctgctcatatgcaggcagctactcttatgtcttcggaact

SEQ ID NO: 624 - protein, 43 aa, Artificial Sequence
  Description of Artificial Sequence: Synthetic antibody
PDRFSGSKSGITASLTISVLQAEDEADYYCCSYAGSYSYVFGT

SEQ ID NO: 625 - DNA, 129 bp, Artificial Sequence
  Description of Artificial Sequence: Synthetic antibody
cctgatcgcttctctggctccaagtctggcaactcggcctccctgacgatctctgggctccaggctgaggatgaggctgattattactgctgctcatatgcaggcagctactcttatgtcttcggaact

SEQ ID NO: 626 - protein, 43 aa, Artificial Sequence
  Description of Artificial Sequence: Synthetic antibody
PDRFSGSKSGNSASLTISGLQAEDEADYYCCSYAGSYSYVFGT

SEQ ID NO: 627 - DNA, 129 bp, Artificial Sequence
  Description of Artificial Sequence: Synthetic antibody
cctgatcgcttctctggctccaagtctggcaactcggcctccctgaccttctctgggctccaggctgaggatgaggctgattattactgctgctcatatgcaggcagttactcttatgtcttcggaact

SEQ ID NO: 628 - protein, 43 aa, Artificial Sequence
  Description of Artificial Sequence: Synthetic antibody
PDRFSGSKSGNSASLTFSGLQAEDEADYYCCSYAGSYSYVFGT

SEQ ID NO: 629 - DNA, 129 bp, Artificial Sequence
  Description of Artificial Sequence: Synthetic antibody
cctgatcgcttctctggctccaagtctggcaacactgcctccctgaccatctctgggctccagtctgaggatgaggctgattattactgctgctcatatgcaggcagctactcttatgtcttcggaact

SEQ ID NO: 630 - protein, 43 aa, Artificial Sequence
  Description of Artificial Sequence: Synthetic antibody
PDRFSGSKSGNTASLTISGLQSEDEADYYCCSYAGSYSYVFGT

SEQ ID NO: 631 - DNA, 129 bp, Artificial Sequence
  Description of Artificial Sequence: Synthetic antibody
cctgatcgcttctctggctccaagtctggcaacacggcctccctgaccatctctgggctccaggctgaggatgaggctgattattatcgctgctcatatgcaggcagctactcttatgtcttcggaact

SEQ ID NO: 632 - protein, 43 aa, Artificial Sequence
  Description of Artificial Sequence: Synthetic antibody
PDRFSGSKSGNTASLTISGLQAEDEADYYRCSYAGSYSYVFGT

SEQ ID NO: 633 - DNA, 129 bp, Artificial Sequence
  Description of Artificial Sequence: Synthetic antibody
cctgatcgcttctctggctccaagtctggcaacacggcctccctgaccatctctgggctccaggctgaggatgaggctgattattactgctgctcatatgcaggcagctactcttatgtcttcggaact

SEQ ID NO: 634 - protein, 43 aa, Artificial Sequence
  Description of Artificial Sequence: Synthetic antibody
PDRFSGSKSGNTASLTISGLQAEDEADYYCCSYAGSYSYVFGT

SEQ ID NO: 635 - DNA, 129 bp, Artificial Sequence
  Description of Artificial Sequence: Synthetic antibody
cctgatcgctgctctggctccaagtctggcaacacggcctccctgaccatctctggtctccaggctgaggatgaggctgattattactgctgctcatatgcaggcagctactcttatgtcttcggaact

SEQ ID NO: 636 - protein, 43 aa, Artificial Sequence
  Description of Artificial Sequence: Synthetic antibody
PDRCSGSKSGNTASLTISGLQAEDEADYYCCSYAGSYSYVFGT

SEQ ID NO: 637 - DNA, 129 bp, Artificial Sequence
  Description of Artificial Sequence: Synthetic antibody
actgatcgcttctctggctccaagtctggcaacacggcctccctgaccatctctgggctccaggctgaggatgaggctgattattactgctgctcatatgcaggcagctactcttatgtcttcggtact

SEQ ID NO: 638 - protein, 43 aa, Artificial Sequence
  Description of Artificial Sequence: Synthetic antibody
TDRFSGSKSGNTASLTISGLQAEDEADYYCCSYAGSYSYVFGT

SEQ ID NO: 639 - DNA, 129 bp, Artificial Sequence
  Description of Artificial Sequence: Synthetic antibody
actgatcgcttctctggccccaagtctggcaacacggcctccctgaccatctctgggctccaggctgaggatgaggctgattattactgctgctcatatgcaggcagctactcttatgtcttcggaact

SEQ ID NO: 640 - protein, 43 aa, Artificial Sequence
  Description of Artificial Sequence: Synthetic antibody
TDRFSGPKSGNTASLTISGLQAEDEADYYCCSYAGSYSYVFGT

SEQ ID NO: 641 - protein, 12 aa, Artificial Sequence
  Description of Artificial Sequence: Synthetic antibody
CSYAGSYTHVVF

SEQ ID NO: 642 - DNA, 129 bp, Artificial Sequence
  Description of Artificial Sequence: Synthetic antibody
gatcgcttctctggctgcaagtctggcaacacggcctccctgaccatctctgggctccaggctgaggatgaggctgattattactgctgctcatatgcaggcagctacactcatgtggttttcggcgga

SEQ ID NO: 643 - protein, 43 aa, Artificial Sequence
  Description of Artificial Sequence: Synthetic antibody
DRFSGCKSGNTASLTISGLQAEDEADYYCCSYAGSYTHVVFGG

SEQ ID NO: 644 - DNA, 129 bp, Artificial Sequence
  Description of Artificial Sequence: Synthetic antibody
gatcgcttctctggctccaagtctggctacacggcctccctgacgatctctgggctccaggctgaggatgaggctgattattactgctgctcatatgcaggcagctacactcatgtggtattcggcgga

SEQ ID NO: 645 - protein, 43 aa, Artificial Sequence
  Description of Artificial Sequence: Synthetic antibody
DRFSGSKSGYTASLTISGLQAEDEADYYCCSYAGSYTHVVFGG

SEQ ID NO: 646 - DNA, 129 bp, Artificial Sequence
  Description of Artificial Sequence: Synthetic antibody
gatcgcttctctggctccaagtctggcaacacggcctccctgaccatctctgtgctccaggctgaggatgatgctgattattactgctgctcatatgcaggcagctacactcatgtggtattcggcgga

SEQ ID NO: 647 - protein, 43 aa, Artificial Sequence
  Description of Artificial Sequence: Synthetic antibody
DRFSGSKSGNTASLTISVLQAEDDADYYCCSYAGSYTHVVFGG

SEQ ID NO: 648 - DNA, 129 bp, Artificial Sequence
  Description of Artificial Sequence: Synthetic antibody
gatcgcttctctggctccaagtctggcaacacggcctccctgaccatctctgtgctccaggctgaggatgagtctgattattactgctgctcatatgcaggcagctacactcatgtggtattcggcgga

SEQ ID NO: 649 - protein, 43 aa, Artificial Sequence
  Description of Artificial Sequence: Synthetic antibody
DRFSGSKSGNTASLTISVLQAEDESDYYCCSYAGSYTHVVFGG

SEQ ID NO: 650 - DNA, 129 bp, Artificial Sequence
  Description of Artificial Sequence: Synthetic antibody
gatcgcttctctggctccaagtctggcaacacggcctccctgaccatctctgggttccaggctgaggatgaggccgattattactgctgctcatatgcaggcagctacactcatgtggtattcggcgga

SEQ ID NO: 651 - protein, 43 aa, Artificial Sequence
  Description of Artificial Sequence: Synthetic antibody
DRFSGSKSGNTASLTISGFQAEDEADYYCCSYAGSYTHVVFGG

SEQ ID NO: 652 - DNA, 129 bp, Artificial Sequence
  Description of Artificial Sequence: Synthetic antibody
gatcgcttctctggctccaagtctggcaacacggcctccctgaccatctctgggctccaggctgaggatgaggctgattattactgctgctcatatgcaggcagctacactcatgtggtattcggcgga

SEQ ID NO: 653 - protein, 43 aa, Artificial Sequence
  Description of Artificial Sequence: Synthetic antibody
DRFSGSKSGNTASLTISGLQAEDEADYYCCSYAGSYTHVVFGG

SEQ ID NO: 654 - DNA, 129 bp, Artificial Sequence
  Description of Artificial Sequence: Synthetic antibody
gatcgcttctctggctccaagtctggcaacacggcctccctgaccatctctgggctccaggccgaggatgaggatgattattactgctgctcatatgcaggcagctacactcatgtggtattcggcgga

SEQ ID NO: 655 - protein, 43 aa, Artificial Sequence
  Description of Artificial Sequence: Synthetic antibody
DRFSGSKSGNTASLTISGLQAEDEDDYYCCSYAGSYTHVVFGG

SEQ ID NO: 656 - DNA, 129 bp, Artificial Sequence
  Description of Artificial Sequence: Synthetic antibody
gatcgcttctctggctccaagtctggcaacacggactccctgaccatctctgggctccaggctgaggatgaggctgattattactgctgctcatatgcaggcagctacactcatgttgtattcggcgga

SEQ ID NO: 657 - protein, 43 aa, Artificial Sequence
  Description of Artificial Sequence: Synthetic antibody
DRFSGSKSGNTDSLTISGLQAEDEADYYCCSYAGSYTHVVFGG

SEQ ID NO: 658 - DNA, 129 bp, Artificial Sequence
  Description of Artificial Sequence: Synthetic antibody
gatcgcttctctggctccaagtccggcaacacggcctccctgaccatctctgggctccaggctgaggatgaggctgattattactgctgctcatatgcaggcagctacactcatgtggtgttcggcgga

SEQ ID NO: 659 - DNA, 129 bp, Artificial Sequence
  Description of Artificial Sequence: Synthetic antibody
gatcgcttctctggctccaagcctggcaacacggcccccctgaccatctctgggctccaggctgaggatgaggctgattattactgctgctcatatgcaggcagctacactcatgtggtattcggcgga

SEQ ID NO: 660 - protein, 43 aa, Artificial Sequence
  Description of Artificial Sequence: Synthetic antibody
DRFSGSKPGNTAPLTISGLQAEDEADYYCCSYAGSYTHVVFGG

SEQ ID NO: 661 - DNA, 129 bp, Artificial Sequence
  Description of Artificial Sequence: Synthetic antibody
gatcgattctctggctccaagtctggcaacacggcctccctgaccatctctgggctccaggctgagtatgaggctgattattactgctgctcatatgcaggcagctacactcatgtggtattcggcgga

SEQ ID NO: 662 - protein, 43 aa, Artificial Sequence
  Description of Artificial Sequence: Synthetic antibody
DRFSGSKSGNTASLTISGLQAEYEADYYCCSYAGSYTHVVFGG

SEQ ID NO: 663 - DNA, 129 bp, Artificial Sequence
  Description of Artificial Sequence: Synthetic antibody
tttcgcttctctggctccaagtctggcaacacggcctccctgaccatctctgggctccaggctgaggatgaggctgattattactgctgctcatatgcaggcagctacactcatgtggtattcggcgga

SEQ ID NO: 664 - protein, 43 aa, Artificial Sequence
  Description of Artificial Sequence: Synthetic antibody
FRFSGSKSGNTASLTISGLQAEDEADYYCCSYAGSYTHVVFGG

SEQ ID NO: 665 - DNA, 129 bp, Artificial Sequence
  Description of Artificial Sequence: Synthetic antibody
atccgcttctctggctccaagtctggcaacacggcctccctgaccatctctgggctccaggctgaggatgaggctgattattactgctgctcatatgcaggcagctacactcatgtggtattcggcgga

SEQ ID NO: 666 - protein, 43 aa, Artificial Sequence
  Description of Artificial Sequence: Synthetic antibody
IRFSGSKSGNTASLTISGLQAEDEADYYCCSYAGSYTHVVFGG

SEQ ID NO: 667 - protein, 12 aa, Artificial Sequence
  Description of Artificial Sequence: Synthetic antibody
CSYAGSYTLYVF

SEQ ID NO: 668 - DNA, 129 bp, Artificial Sequence
  Description of Artificial Sequence: Synthetic antibody
gatcgcttctctggctccaagtctggcaacacggcctccctgaccttctctgggctcctggctgaggatgaggctgattattactgctgctcatatgcaggcagctacaccctttatgtcttcggaact

SEQ ID NO: 669 - protein, 43 aa, Artificial Sequence
  Description of Artificial Sequence: Synthetic antibody
DRFSGSKSGNTASLTFSGLLAEDEADYYCCSYAGSYTLYVFGT

SEQ ID NO: 670 - DNA, 129 bp, Artificial Sequence
  Description of Artificial Sequence: Synthetic antibody
gatcgcttctctggctccaagtctggcaacacggcctccctgaccatctctgggctccaggctgaggatgaggctgattattactgctgctcatatgcaggcagctacactctttatgtcttcggaact

SEQ ID NO: 671 - protein, 43 aa, Artificial Sequence
  Description of Artificial Sequence: Synthetic antibody
DRFSGSKSGNTASLTISGLQAEDEADYYCCSYAGSYTLYVFGT

SEQ ID NO: 672 - DNA, 129 bp, Artificial Sequence
  Description of Artificial Sequence: Synthetic antibody
gatcgcttctctggctccaagtctggcaacacggcctccctgaccatctctgggctccaggctgaggatgaggctgattattactgctgctcatatgcaggcagctacaccctttatgtcttcggaact

SEQ ID NO: 673 - DNA, 129 bp, Artificial Sequence
  Description of Artificial Sequence: Synthetic antibody
gatcgcttctctggctccaagtctggcaacacggcctccctgaccatctctgggctccaggctgaggatgaggctgatatttactgctgctcatatgcaggcagctacactctttatgtcttcggaact

SEQ ID NO: 674 - protein, 43 aa, Artificial Sequence
  Description of Artificial Sequence: Synthetic antibody
DRFSGSKSGNTASLTISGLQAEDEADIYCCSYAGSYTLYVFGT

SEQ ID NO: 675 - DNA, 129 bp, Artificial Sequence
  Description of Artificial Sequence: Synthetic antibody
gatcgcttctctggctccaagtctggcaacacggcctccctgaccatctctgggctccaggctgagaatgaggctgactattactgctgctcatatgcaggcagctacaccctttatgtcttcggaact

SEQ ID NO: 676 - protein, 43 aa, Artificial Sequence
  Description of Artificial Sequence: Synthetic antibody
DRFSGSKSGNTASLTISGLQAENEADYYCCSYAGSYTLYVFGT

SEQ ID NO: 677 - DNA, 129 bp, Artificial Sequence
  Description of Artificial Sequence: Synthetic antibody
gatcgattctctggctccaagtctggcaacacggcctacctgaccatctctgggctccaggctgaggatgaggctgattattactgctgctcatatgcaggcagctacactctttatgtcttcggaact

SEQ ID NO: 678 - protein, 43 aa, Artificial Sequence
  Description of Artificial Sequence: Synthetic antibody
DRFSGSKSGNTAYLTISGLQAEDEADYYCCSYAGSYTLYVFGT

SEQ ID NO: 679 - DNA, 129 bp, Artificial Sequence
  Description of Artificial Sequence: Synthetic antibody
tttcgcttctctggctccaagtctggcaacacggcctccctgaccatctctgggctccaggctgaggatgaggctgattattactgctgctcatatgcaggcagctacactctttatgtcttcggaact

SEQ ID NO: 680 - protein, 43 aa, Artificial Sequence
  Description of Artificial Sequence: Synthetic antibody
FRFSGSKSGNTASLTISGLQAEDEADYYCCSYAGSYTLYVFGT

SEQ ID NO: 681 - DNA, 129 bp, Artificial Sequence
  Description of Artificial Sequence: Synthetic antibody
ttccgcttctctggctccaagtctggcaacacggcctccctgaccatctctgggctccaggctgaggatgaggctgattattactgctgctcatatgcaggcagctacactctttatgtcttcggaact

SEQ ID NO: 682 - DNA, 129 bp, Artificial Sequence
  Description of Artificial Sequence: Synthetic antibody
ttccgcttctctggctccaagtctggcaacacggcctccctgaccatctctgggctccaggctgaggatgaggctgattattactgctgctcatatgcaggcagctacaccctttatgtcttcggaact

SEQ ID NO: 683 - DNA, 129 bp, Artificial Sequence
  Description of Artificial Sequence: Synthetic antibody
atccgcttctctggctccaagtctggcaacacggcctccctgaccatctctgggctccaggctgaggatgaggctgattattactgctgctcatatgcaggcagctacactctttatgtcttcggaact

SEQ ID NO: 684 - protein, 43 aa, Artificial Sequence
  Description of Artificial Sequence: Synthetic antibody
IRFSGSKSGNTASLTISGLQAEDEADYYCCSYAGSYTLYVFGT

SEQ ID NO: 685 - DNA, 129 bp, Artificial Sequence
  Description of Artificial Sequence: Synthetic antibody
atccgcttctctggctccaagtctggcaacacggcctccctgaccatctctgggctccaggctgaggatgaggctgattattactgctgctcatatgcaggcagctacaccctttatgtcttcggaact

SEQ ID NO: 686 - DNA, 129 bp, Artificial Sequence
  Description of Artificial Sequence: Synthetic antibody
atacgcttctctggctccaagtctggcaacacggcctccctgaccatctctgggctccaggctgaggatgaggctgattattactgctgctcatatgcaggcagctacactctttatgtcttcggaact

SEQ ID NO: 687 - DNA, 129 bp, Artificial Sequence
  Description of Artificial Sequence: Synthetic antibody
gtgatcgcttctggctccaagtctggcaacacggcctccctgaccatctctgggctccaggctgaggatgaggctgattattactgctgctcatatgcaggcagctacactctttatgtcttcggaact

SEQ ID NO: 688 - protein, 43 aa, Artificial Sequence
  Description of Artificial Sequence: Synthetic antibody
VIASGSKSGNTASLTISGLQAEDEADYYCCSYAGSYTLYVFGT

SEQ ID NO: 689 - protein, 12 aa, Artificial Sequence
  Description of Artificial Sequence: Synthetic antibody
CSYAGSSTPVVF

SEQ ID NO: 690 - DNA, 129 bp, Artificial Sequence
  Description of Artificial Sequence: Synthetic antibody
attcgcttctctggctccaagtctggcaagacggcctccctgacaatctctgggctccaggctgaggacgaggctgattattactgctgctcatatgcaggtagtagcactcccgtggtattcggcgga

SEQ ID NO: 691 - protein, 43 aa, Artificial Sequence
  Description of Artificial Sequence: Synthetic antibody
IRFSGSKSGKTASLTISGLQAEDEADYYCCSYAGSSTPVVFGG

SEQ ID NO: 692 - DNA, 129 bp, Artificial Sequence
  Description of Artificial Sequence: Synthetic antibody
attcgcttctctggctccaagtctggcaactcggcctccctgacaatctctgggctccaggctgaggacgaggctgattattactgctgctcatatgcaggtagtagcacccctgtggtattcggcgga

SEQ ID NO: 693 - protein, 43 aa, Artificial Sequence
  Description of Artificial Sequence: Synthetic antibody
IRFSGSKSGNSASLTISGLQAEDEADYYCCSYAGSSTPVVFGG

SEQ ID NO: 694 - DNA, 129 bp, Artificial Sequence
  Description of Artificial Sequence: Synthetic antibody
attcgcttctctggctccaagtctggcaacacggcctgcctgacaatctctgggctccaggctgaggacgaggctgattattactgctgctcatatgcaggtagtagcactccggtggtattcggcgga

SEQ ID NO: 695 - protein, 43 aa, Artificial Sequence
  Description of Artificial Sequence: Synthetic antibody
IRFSGSKSGNTACLTISGLQAEDEADYYCCSYAGSSTPVVFGG

SEQ ID NO: 696 - DNA, 129 bp, Artificial Sequence
  Description of Artificial Sequence: Synthetic antibody
aatcgcttgtctggctccaagtctggcatcacggcctccctgacaatctctgggctccaggctgaggacgaggctgattattactgctgctcatatgcaggtagtagcactcccgtggtattcggcgga

SEQ ID NO: 697 - protein, 43 aa, Artificial Sequence
  Description of Artificial Sequence: Synthetic antibody
NRLSGSKSGITASLTISGLQAEDEADYYCCSYAGSSTPVVFGG

SEQ ID NO: 698 - DNA, 129 bp, Artificial Sequence
  Description of Artificial Sequence: Synthetic antibody
aatcgcttctctggctccaagtctggcatcacggcctccctgtcaatctctgggctccaggctgaggacgaggctgattattactgctgctcatatgcaggtagtagcactcccgtggtattcggcgga

SEQ ID NO: 699 - protein, 43 aa, Artificial Sequence
  Description of Artificial Sequence: Synthetic antibody
NRFSGSKSGITASLSISGLQAEDEADYYCCSYAGSSTPVVFGG

SEQ ID NO: 700 - DNA, 129 bp, Artificial Sequence
  Description of Artificial Sequence: Synthetic antibody
aatcgcttctctggctccaagtctggcaactctgcctccctgacaatctctgggctccaggctgaggacgaggctgattattactgctgctcatatgcaggtagtagcactccggtggtattcggcgga

SEQ ID NO: 701 - protein, 43 aa, Artificial Sequence
  Description of Artificial Sequence: Synthetic antibody
NRFSGSKSGNSASLTISGLQAEDEADYYCCSYAGSSTPVVFGG

SEQ ID NO: 702 - DNA, 129 bp, Artificial Sequence
  Description of Artificial Sequence: Synthetic antibody
aatcgcttctctggctccaagtctggcaacacggcctccctgacaatctctgggctccaggttgaggacgtggctgattattactgctgctcatatgcaggtagtagcactcccgtggtattcggcgga

SEQ ID NO: 703 - protein, 43 aa, Artificial Sequence
  Description of Artificial Sequence: Synthetic antibody
NRFSGSKSGNTASLTISGLQVEDVADYYCCSYAGSSTPVVFGG

SEQ ID NO: 704 - DNA, 129 bp, Artificial Sequence
  Description of Artificial Sequence: Synthetic antibody
aatcgcttctctggctccaagtctggcaacacggcctccctgacaatctctgggctccaggctgaggacgaggctgattattactgctgctcatatgcaggtagtagcactccggtggtattcggcgga

SEQ ID NO: 705 - protein, 43 aa, Artificial Sequence
  Description of Artificial Sequence: Synthetic antibody
NRFSGSKSGNTASLTISGLQAEDEADYYCCSYAGSSTPVVFGG

SEQ ID NO: 706 - DNA, 129 bp, Artificial Sequence
  Description of Artificial Sequence: Synthetic antibody
aatcgcttctctggctccaagtctggcaacacggcctccctgacaatctctgggctccaggctgaggacgaggctgattattactgctgctcatatgcaggtagtagcactcccgtggtattcggcgga

SEQ ID NO: 707 - DNA, 129 bp, Artificial Sequence
  Description of Artificial Sequence: Synthetic antibody
aatcgcttctctggctccaagtctggcaacacggcctccctgacaatctctgggctccaggctgaggacgaggctgattattactgctgctcatatgcaggtagtagcacccctgtggtattcggcgga

SEQ ID NO: 708 - DNA, 129 bp, Artificial Sequence
  Description of Artificial Sequence: Synthetic antibody
atccgcttctctggctccaagtctggcaacacggcctccctgacaatctctgggctccaggctgaggacgaggctgattattactgctgctcatatgcaggtagtagcactccggtggtattcggcgga

SEQ ID NO: 709 - protein, 43 aa, Artificial Sequence
  Description of Artificial Sequence: Synthetic antibody
IRFSGSKSGNTASLTISGLQAEDEADYYCCSYAGSSTPVVFGG

SEQ ID NO: 710 - DNA, 129 bp, Artificial Sequence
  Description of Artificial Sequence: Synthetic antibody
atccgcttctctggctccaagtctggcaacacggcctccctgacaatctctgggctccaggctgaggacgaggctgattattactgctgctcatatgcaggtagtagcactcccgtggtattcggcgga

SEQ ID NO: 711 - DNA, 129 bp, Artificial Sequence
  Description of Artificial Sequence: Synthetic antibody
atccgcttctctggctccaagtctggcaacacggcctccctgacaatctctgggctccaggctgaggacgaggctgattattactgctgctcatatgcaggtagtagcacccctgtggtattcggcgga

SEQ ID NO: 712 - protein, 9 aa, Artificial Sequence
  Description of Artificial Sequence: Synthetic antibody
CSYAGSWVF

SEQ ID NO: 713 - DNA, 129 bp, Artificial Sequence
  Description of Artificial Sequence: Synthetic antibody
ggggttcttatccgcttctctggctccaagtctggcaacacggcctccctgacaatctctgggctccaggctgaggacgaggctgattattactgctgctcatatgcaggtagttgggtattcggcgga

SEQ ID NO: 714 - protein, 43 aa, Artificial Sequence
  Description of Artificial Sequence: Synthetic antibody
GVLIRFSGSKSGNTASLTISGLQAEDEADYYCCSYAGSWVFGG

SEQ ID NO: 715 - DNA, 129 bp, Artificial Sequence
  Description of Artificial Sequence: Synthetic antibody
gggtttctaatccgcttctctggctccaagtctggcaacacggcctccctgacaatctctgggctccaggctgaggacgaggctgattattactgctgctcatatgcaggtagttgggtattcggcgga

SEQ ID NO: 716 - protein, 43 aa, Artificial Sequence
  Description of Artificial Sequence: Synthetic antibody
GFLIRFSGSKSGNTASLTISGLQAEDEADYYCCSYAGSWVFGG

SEQ ID NO: 717 - DNA, 129 bp, Artificial Sequence
  Description of Artificial Sequence: Synthetic antibody
ggggtttcttatcgcttctctggctccaagtctggcaactcggcctccctgacaatctctgggctccaggctgaggacgaggctgattattactgctgctcatatgcaggtagttgggtattcggcgga

SEQ ID NO: 718 - protein, 43 aa, Artificial Sequence
  Description of Artificial Sequence: Synthetic antibody
GVSYRFSGSKSGNSASLTISGLQAEDEADYYCCSYAGSWVFGG

SEQ ID NO: 719 - DNA, 129 bp, Artificial Sequence
  Description of Artificial Sequence: Synthetic antibody
ggggtttcttatcgcttctctggctccaagtctggcaacacggcctccctgacaatctctgggctcctggctgaggacgaggctgattattactgctgctcatatgcaggtagttgggtattcggcgga

SEQ ID NO: 720 - protein, 43 aa, Artificial Sequence
  Description of Artificial Sequence: Synthetic antibody
GVSYRFSGSKSGNTASLTISGLLAEDEADYYCCSYAGSWVFGG

SEQ ID NO: 721 - DNA, 129 bp, Artificial Sequence
  Description of Artificial Sequence: Synthetic antibody
ggggtttctaatcgcttctctggctccatgtctggcaacacggcctccctgacaatctcttggctccaggctgaggacgaggctgattattactgctgctcatatgcaggtagttgggtgttcggcgga

SEQ ID NO: 722 - protein, 43 aa, Artificial Sequence
  Description of Artificial Sequence: Synthetic antibody
GVSNRFSGSMSGNTASLTISWLQAEDEADYYCCSYAGSWVFGG

SEQ ID NO: 723 - DNA, 129 bp, Artificial Sequence
  Description of Artificial Sequence: Synthetic antibody
ggggtttctaatcgcttctctggctccaagtctggctacacggcctccctgacaatctctgggctcgaggctgaggacgaggctgattattactgctgctcatatgcaggtagttgggtattcggcgga

SEQ ID NO: 724 - protein, 43 aa, Artificial Sequence
  Description of Artificial Sequence: Synthetic antibody
GVSNRFSGSKSGYTASLTISGLEAEDEADYYCCSYAGSWVFGG

SEQ ID NO: 725 - DNA, 129 bp, Artificial Sequence
  Description of Artificial Sequence: Synthetic antibody
ggggtttctaatcgcttctctggctccaagtctggcaacacggcctccctgtctatctctgggctccaggctgaggacgaggctgattattactgctgctcatatgcaggtagttgggtgttcggcgga

SEQ ID NO: 726 - protein, 43 aa, Artificial Sequence
  Description of Artificial Sequence: Synthetic antibody
GVSNRFSGSKSGNTASLSISGLQAEDEADYYCCSYAGSWVFGG

SEQ ID NO: 727 - DNA, 129 bp, Artificial Sequence
  Description of Artificial Sequence: Synthetic antibody
ggggtttctaatcgcttctctggctccaagtctggcaacacggcctccctgacaatctctgggctccaggctgaggacgaggctgattattactgctgctcatatgcaggtagttgggtgttcggcgga

SEQ ID NO: 728 - protein, 43 aa, Artificial Sequence
  Description of Artificial Sequence: Synthetic antibody
GVSNRFSGSKSGNTASLTISGLQAEDEADYYCCSYAGSWVFGG

SEQ ID NO: 729 - DNA, 129 bp, Artificial Sequence
  Description of Artificial Sequence: Synthetic antibody
ggggtttctaatcgcttctctggctccaagtctggcaacacggcctccctgacaatctctgggctccaggctgaggacgaggctgattattactgctgctcatatgcaggtagttgggtattcggcgga

SEQ ID NO: 730 - DNA, 129 bp, Artificial Sequence
  Description of Artificial Sequence: Synthetic antibody
ggggtttctaatcgcttctctggctccaagcctggcaacacggcctccctgacaatctctgggctccaggctgaggacgaggctgattattactgctgctcatatgcgggtagttgggtattcggcgga

SEQ ID NO: 731 - protein, 43 aa, Artificial Sequence
  Description of Artificial Sequence: Synthetic antibody
GVSNRFSGSKPGNTASLTISGLQAEDEADYYCCSYAGSWVFGG

SEQ ID NO: 732 - DNA, 129 bp, Artificial Sequence
  Description of Artificial Sequence: Synthetic antibody
ggggttgataatcgcttctctggctccaagtctggcaacacggcctccctgacaatctctgggctccaggctgaggacgaggctgattattactgctgctcatatgcaggtagttgggtattcggcgga

SEQ ID NO: 733 - protein, 43 aa, Artificial Sequence
  Description of Artificial Sequence: Synthetic antibody
GVDNRFSGSKSGNTASLTISGLQAEDEADYYCCSYAGSWVFGG

SEQ ID NO: 734 - DNA, 129 bp, Artificial Sequence
  Description of Artificial Sequence: Synthetic antibody
gggggttcttatcgcttctctggctccaagtctggcaacacggcctccctgacaatctctgggctccaggctgaggacgaggctgattattactgctgctcatatgcaggtagttgggtattcggcgga

SEQ ID NO: 735 - protein, 43 aa, Artificial Sequence
  Description of Artificial Sequence: Synthetic antibody
GGSYRFSGSKSGNTASLTISGLQAEDEADYYCCSYAGSWVFGG

SEQ ID NO: 736 - protein, 10 aa, Artificial Sequence
  Description of Artificial Sequence: Synthetic antibody
CSYAGSYPRL

SEQ ID NO: 737 - DNA, 129 bp, Artificial Sequence
  Description of Artificial Sequence: Synthetic antibody
gtccctgatcgcttctctggctccaggtctgacaacacggcctccctgaccatctctggtctcctggctgaggatgaggctgattattactgctgctcatatgcaggcagctacccccgcctcggaact

SEQ ID NO: 738 - protein, 43 aa, Artificial Sequence
  Description of Artificial Sequence: Synthetic antibody
VPDRFSGSRSDNTASLTISGLLAEDEADYYCCSYAGSYPRLGT

SEQ ID NO: 739 - DNA, 129 bp, Artificial Sequence
  Description of Artificial Sequence: Synthetic antibody
gtccctgatcgcttctctggctccaagtctgacaagtcggcctccctgaccatctctggtctccaggctgaggatgaggctgattattactgctgctcatatgcaggcagctacccccgcctcggaact

SEQ ID NO: 740 - protein, 43 aa, Artificial Sequence
  Description of Artificial Sequence: Synthetic antibody
VPDRFSGSKSDKSASLTISGLQAEDEADYYCCSYAGSYPRLGT

SEQ ID NO: 741 - DNA, 129 bp, Artificial Sequence
  Description of Artificial Sequence: Synthetic antibody
gtccctgatcgcttctctggctccaagtctgacaacagggcctccctgaccttctctggtctccaggctgaggatgaggctgattattactgctgctcatatgcaggcagctacccccgcctcggaact

SEQ ID NO: 742 - protein, 43 aa, Artificial Sequence
  Description of Artificial Sequence: Synthetic antibody
VPDRFSGSKSDNRASLTFSGLQAEDEADYYCCSYAGSYPRLGT

SEQ ID NO: 743 - DNA, 129 bp, Artificial Sequence
  Description of Artificial Sequence: Synthetic antibody
gtccctgatcgcttctctggctccaagtctgacaacacggcctccctgtcgatctctggtctccaggctgaggatgaggctgattattactgctgctcatatgcaggcagctacccccgcctcggaact

SEQ ID NO: 744 - protein, 43 aa, Artificial Sequence
  Description of Artificial Sequence: Synthetic antibody
VPDRFSGSKSDNTASLSISGLQAEDEADYYCCSYAGSYPRLGT

SEQ ID NO: 745 - DNA, 129 bp, Artificial Sequence
  Description of Artificial Sequence: Synthetic antibody
gtccctgatcgcttctctggctccaagtctgacaacacggcctccctgaccatctctggtctccaggctgaggatgaggctgattattactgctgctcatatgcaggcagctacccccgcctcggaact

SEQ ID NO: 746 - protein, 43 aa, Artificial Sequence
  Description of Artificial Sequence: Synthetic antibody
VPDRFSGSKSDNTASLTISGLQAEDEADYYCCSYAGSYPRLGT

SEQ ID NO: 747 - DNA, 129 bp, Artificial Sequence
  Description of Artificial Sequence: Synthetic antibody
gtccctgatcgcttctctggctccaagtctgacaacacggcctccctgaccatctctggtctccaggctgaggatgaggctaattattactgctgctcatatgcaggcagctacccccgcctcggaacc

SEQ ID NO: 748 - protein, 43 aa, Artificial Sequence
  Description of Artificial Sequence: Synthetic antibody
VPDRFSGSKSDNTASLTISGLQAEDEANYYCCSYAGSYPRLGT

SEQ ID NO: 749 - DNA, 129 bp, Artificial Sequence
  Description of Artificial Sequence: Synthetic antibody
gtccctgatcgcttctctggctccaagtctgacaacacggcccccctgaccatctctgatctccaggctgaggatgaggctgattattactgctgctcatatgcaggcagctacccccgcctcggaact

SEQ ID NO: 750 - protein, 43 aa, Artificial Sequence
  Description of Artificial Sequence: Synthetic antibody
VPDRFSGSKSDNTAPLTISDLQAEDEADYYCCSYAGSYPRLGT

SEQ ID NO: 751 - DNA, 129 bp, Artificial Sequence
  Description of Artificial Sequence: Synthetic antibody
gtccctgatcgcttctctggctccaagcctgacaacacggcctccccgaccatctctggtctccaggctgaggataaggctgattattactgctgctcatatgcaggcagctacccccgcctcggaact

SEQ ID NO: 752 - protein, 43 aa, Artificial Sequence
  Description of Artificial Sequence: Synthetic antibody
VPDRFSGSKPDNTASPTISGLQAEDKADYYCCSYAGSYPRLGT

SEQ ID NO: 753 - DNA, 129 bp, Artificial Sequence
  Description of Artificial Sequence: Synthetic antibody
gtccctgatcgcttctctggctccaaatctgacaacacggcctccctgaccatctctggtctccaggctgaggatgaggctgattattactgctgctcatatgcaggcagctacccccgcctcggaacc

SEQ ID NO: 754 - DNA, 129 bp, Artificial Sequence
  Description of Artificial Sequence: Synthetic antibody
gtccctgaccgcttctctggctccaagtctgacaacacggcctccctgaccatctctggtctccaggctgaggatgaggctgattattactgctgctcatatgcaggcagctacccccgtctcggaact

SEQ ID NO: 755 - DNA, 129 bp, Artificial Sequence
  Description of Artificial Sequence: Synthetic antibody
gtcccgtttcgcttctctggctccaagtctgacaacacggcctccctgaccatctctggtctccaggctgaggatgaggctgattattactgctgctcatatgcaggcagctacccccgcctcggaact

SEQ ID NO: 756 - protein, 43 aa, Artificial Sequence
  Description of Artificial Sequence: Synthetic antibody
VPFRFSGSKSDNTASLTISGLQAEDEADYYCCSYAGSYPRLGT

SEQ ID NO: 757 - DNA, 129 bp, Artificial Sequence
  Description of Artificial Sequence: Synthetic antibody
gtacctgatcgcttctctggctccaagtctgacaacacggcctccctgaccatctcttgtctccaggctgaggatgaggctgattattactgctgctcatatgcaggcagctacccccgcctcggaact

SEQ ID NO: 758 - protein, 43 aa, Artificial Sequence
  Description of Artificial Sequence: Synthetic antibody
VPDRFSGSKSDNTASLTISCLQAEDEADYYCCSYAGSYPRLGT

SEQ ID NO: 759 - protein, 12 aa, Artificial Sequence
  Description of Artificial Sequence: Synthetic antibody
CSYAGSYTFVVF

SEQ ID NO: 760 - DNA, 129 bp, Artificial Sequence
  Description of Artificial Sequence: Synthetic antibody
gttcgcttctctggctcgaagtctggcaacgcggcctccctgaccatctctgggctccaggctgaggatgaggctgattattactgctgctcatatgcaggcagctacactttcgtggtattcggcgga

SEQ ID NO: 761 - protein, 43 aa, Artificial Sequence
  Description of Artificial Sequence: Synthetic antibody
VRFSGSKSGNAASLTISGLQAEDEADYYCCSYAGSYTFVVFGG

SEQ ID NO: 762 - DNA, 129 bp, Artificial Sequence
  Description of Artificial Sequence: Synthetic antibody
gttcgcttctctggctccaagtctggcatcgcggcctccctgaccatctctgggctccaggctgaggatgaggctgattattactgctgctcatatgcaggcagctacactttcgtggtattcggcgga

SEQ ID NO: 763 - protein, 43 aa, Artificial Sequence
  Description of Artificial Sequence: Synthetic antibody
VRFSGSKSGIAASLTISGLQAEDEADYYCCSYAGSYTFVVFGG

SEQ ID NO: 764 - DNA, 129 bp, Artificial Sequence
  Description of Artificial Sequence: Synthetic antibody
gatcgcttctctggctccaagtctggcaacgcggcctccctgaccatctcttggctccaggctgaggatgaggctgattattactgctgctcatatgcaggcagctacactttcgttgtattcggcgga

SEQ ID NO: 765 - protein, 43 aa, Artificial Sequence
  Description of Artificial Sequence: Synthetic antibody
DRFSGSKSGNAASLTISWLQAEDEADYYCCSYAGSYTFVVFGG

SEQ ID NO: 766 - DNA, 129 bp, Artificial Sequence
  Description of Artificial Sequence: Synthetic antibody
gatcgcttctctggctccaagtctggcaacgcggcctccctgaccatctctgggctccaggctgaggatggggctgattattactgctgctcatatgcaggcagctacactttcgtggtattcggcggc

SEQ ID NO: 767 - protein, 43 aa, Artificial Sequence
  Description of Artificial Sequence: Synthetic antibody
DRFSGSKSGNAASLTISGLQAEDGADYYCCSYAGSYTFVVFGG

SEQ ID NO: 768 - DNA, 129 bp, Artificial Sequence
  Description of Artificial Sequence: Synthetic antibody
gatcgcttctctggctccaagtctggcaacgcggcctccctgaccatctctgggctccaggctgaggatgaggctgattattactgctgctcatatgcaggcagctacactttcgtggtattcggcgga

SEQ ID NO: 769 - protein, 43 aa, Artificial Sequence
  Description of Artificial Sequence: Synthetic antibody
DRFSGSKSGNAASLTISGLQAEDEADYYCCSYAGSYTFVVFGG

SEQ ID NO: 770 - DNA, 129 bp, Artificial Sequence
  Description of Artificial Sequence: Synthetic antibody
gatcgcttctctggctccaagtctggcaacacggcctccctgaccatctctgggctccaggctgaggatgaggctgattattactgctgctcatatgcaggcagctacacttttgtggtattcggcgga

SEQ ID NO: 771 - protein, 43 aa, Artificial Sequence
  Description of Artificial Sequence: Synthetic antibody
DRFSGSKSGNTASLTISGLQAEDEADYYCCSYAGSYTFVVFGG

SEQ ID NO: 772 - DNA, 129 bp, Artificial Sequence
  Description of Artificial Sequence: Synthetic antibody
gatcgattctctggctccaagtctggcaacgcggcctccctgaccatctcttggctccaggctgaggatgaggctgattattactgctgctcatatgcaggcagctacactttcgtggtattcggcgga

SEQ ID NO: 773 - DNA, 129 bp, Artificial Sequence
  Description of Artificial Sequence: Synthetic antibody
tttcgcttctctggctccaagtctggcaacgcggcctccctgaccatctctgggctccaggctgaggatgaggctgattattactgctgctcatatgcaggcagctacactttcgtggtattcggcgga

SEQ ID NO: 774 - protein, 43 aa, Artificial Sequence
  Description of Artificial Sequence: Synthetic antibody
FRFSGSKSGNAASLTISGLQAEDEADYYCCSYAGSYTFVVFGG

SEQ ID NO: 775 - DNA, 129 bp, Artificial Sequence
  Description of Artificial Sequence: Synthetic antibody
tttcgcttctctggctccaagtctggcaacacggcctccctgaccatctctgggctccaggctgaggatgaggctgattattactgctgctcatatgcaggcagctacacttttgtggtattcggcgga

SEQ ID NO: 776 - protein, 43 aa, Artificial Sequence
  Description of Artificial Sequence: Synthetic antibody
FRFSGSKSGNTASLTISGLQAEDEADYYCCSYAGSYTFVVFGG

SEQ ID NO: 777 - DNA, 129 bp, Artificial Sequence
  Description of Artificial Sequence: Synthetic antibody
gttcgcttctctggctccaagtctggcaacgcggcctccctgaccatctctgggctccaggctgaggatgaggctgattattactgctgctcatatgcaggcagctacactttcgtggtattcggcgga

SEQ ID NO: 778 - DNA, 129 bp, Artificial Sequence
  Description of Artificial Sequence: Synthetic antibody
atccgcttctctggctccaagtctggcaacgcggcctccctgaccatctctgggctccaggctgaggatgaggctgattattactgctgctcatatgcaggcagctacactttcgtggtattcggcgga

SEQ ID NO: 779 - protein, 43 aa, Artificial Sequence
  Description of Artificial Sequence: Synthetic antibody
IRFSGSKSGNAASLTISGLQAEDEADYYCCSYAGSYTFVVFGG

SEQ ID NO: 780 - DNA, 129 bp, Artificial Sequence
  Description of Artificial Sequence: Synthetic antibody
atccgcttctctggctccaagtctggcaacacggcctccctgaccatctctgggctccaggctgaggatgaggctgattattactgctgctcatatgcaggcagctacacttttgtggtattcggcgga

SEQ ID NO: 781 - protein, 43 aa, Artificial Sequence
  Description of Artificial Sequence: Synthetic antibody
IRFSGSKSGNTASLTISGLQAEDEADYYCCSYAGSYTFVVFGG

SEQ ID NO: 782 - protein, 11 aa, Artificial Sequence
  Description of Artificial Sequence: Synthetic antibody
CSYAGSDTLVL

SEQ ID NO: 783 - DNA, 129 bp, Artificial Sequence
  Description of Artificial Sequence: Synthetic antibody
ctgatccgcttctctggctccaggtctggcaacacggcctccctgaccatctctgggctccaggctgaggatgaggctgattattactgttgctcatatgcaggcagcgacactttggtactcggcgga

SEQ ID NO: 784 - protein, 43 aa, Artificial Sequence
  Description of Artificial Sequence: Synthetic antibody
LIRFSGSRSGNTASLTISGLQAEDEADYYCCSYAGSDTLVLGG

SEQ ID NO: 785 - DNA, 129 bp, Artificial Sequence
  Description of Artificial Sequence: Synthetic antibody
cgtgatcgcttctctggctcctggtctggcaacacggcctccctgaccatctctgggctccaggctgaggatgaggctgattattactgttgctcatatgcaggcagcgacactttggtactcggcgga

SEQ ID NO: 786 - protein, 43 aa, Artificial Sequence
  Description of Artificial Sequence: Synthetic antibody
RDRFSGSWSGNTASLTISGLQAEDEADYYCCSYAGSDTLVLGG

SEQ ID NO: 787 - DNA, 129 bp, Artificial Sequence
  Description of Artificial Sequence: Synthetic antibody
cctgatcgcttctctggctccatgtctggcaacacggcctccctgtccatctctgggctccaggctgaggatgaggctgattattactgttgctcatatgcaggcagcgacactttggtactcggcgga

SEQ ID NO: 788 - protein, 43 aa, Artificial Sequence
  Description of Artificial Sequence: Synthetic antibody
PDRFSGSMSGNTASLSISGLQAEDEADYYCCSYAGSDTLVLGG

SEQ ID NO: 789 - DNA, 129 bp, Artificial Sequence
  Description of Artificial Sequence: Synthetic antibody
cctgatcgcttctctggctccatgtctggcaacacggcctccctgaccatctctgggctccagtctgaggatgaggctgattattactgttgctcatatgcaggcagcgacactttggtactcggcgga

SEQ ID NO: 790 - protein, 43 aa, Artificial Sequence
  Description of Artificial Sequence: Synthetic antibody
PDRFSGSMSGNTASLTISGLQSEDEADYYCCSYAGSDTLVLGG

SEQ ID NO: 791 - DNA, 129 bp, Artificial Sequence
  Description of Artificial Sequence: Synthetic antibody
cctgatcgcttctctggctccatgtctggcaacacggcctccctgaccatctctgggctccaggctgaggatgagtctgattattactgttgctcatatgcaggcagcgacactttggtactcggcgga

SEQ ID NO: 792 - protein, 43 aa, Artificial Sequence
  Description of Artificial Sequence: Synthetic antibody
PDRFSGSMSGNTASLTISGLQAEDESDYYCCSYAGSDTLVLGG

SEQ ID NO: 793 - DNA, 129 bp, Artificial Sequence
  Description of Artificial Sequence: Synthetic antibody
cctgatcgcttctctggctccaggtctggctacacggcctccctgacgatctctgggctccaggctgaggatgaggctgattattactgttgctcatatgcaggcagcgacactttggtactcggcgga

SEQ ID NO: 794 - protein, 43 aa, Artificial Sequence
  Description of Artificial Sequence: Synthetic antibody
PDRFSGSRSGYTASLTISGLQAEDEADYYCCSYAGSDTLVLGG

SEQ ID NO: 795 - DNA, 129 bp, Artificial Sequence
  Description of Artificial Sequence: Synthetic antibody
cctgatcgcttctctggctccaggtctggcaactcggcctccctgaccatctctgggctccaggctgatgatgaggctgattattactgttgctcatatgcaggcagcgacactttggtactcggcgga

SEQ ID NO: 796 - protein, 43 aa, Artificial Sequence
  Description of Artificial Sequence: Synthetic antibody
PDRFSGSRSGNSASLTISGLQADDEADYYCCSYAGSDTLVLGG

SEQ ID NO: 797 - DNA, 129 bp, Artificial Sequence
  Description of Artificial Sequence: Synthetic antibody
cctgatcgcttctctggctccaggtctggcaacacggcctcccttaccatctctgggctcctggctgaggatgaggctgattattactgttgctcatatgcaggcagcgacactttggtactcggcgga

SEQ ID NO: 798 - protein, 43 aa, Artificial Sequence
  Description of Artificial Sequence: Synthetic antibody
PDRFSGSRSGNTASLTISGLLAEDEADYYCCSYAGSDTLVLGG

SEQ ID NO: 799 - DNA, 129 bp, Artificial Sequence
  Description of Artificial Sequence: Synthetic antibody
cctgatcgcttctctggctccaggtctggcaacacggcctccctgaccatctctgggctccaggctgaggatgaggctgattattactgttgctcatatgcaggcagcgacactttggtactcggcgga

SEQ ID NO: 800 - protein, 43 aa, Artificial Sequence
  Description of Artificial Sequence: Synthetic antibody
PDRFSGSRSGNTASLTISGLQAEDEADYYCCSYAGSDTLVLGG

SEQ ID NO: 801 - DNA, 129 bp, Artificial Sequence
  Description of Artificial Sequence: Synthetic antibody
cctgaccgcttctctggctccaggtctggcaacacggcctccctgaccatctctgggctccaggctgaggatgaggctgattattactgttgctcatatgcaggtagcgacactttggtactcggcgga

SEQ ID NO: 802 - DNA, 129 bp, Artificial Sequence
  Description of Artificial Sequence: Synthetic antibody
cctgaccgcttctctggctccaggtctggcaacacggcctccctgaccacctctgggctccaggctgaggatgaggctgattattactgttgctcatatgcaggcagcgacactttggtactcggcgga

SEQ ID NO: 803 - protein, 43 aa, Artificial Sequence
  Description of Artificial Sequence: Synthetic antibody
PDRFSGSRSGNTASLTTSGLQAEDEADYYCCSYAGSDTLVLGG

SEQ ID NO: 804 - DNA, 129 bp, Artificial Sequence
  Description of Artificial Sequence: Synthetic antibody
cctgatcgcttctctggctccaggtctggcaacacggcctccctgaccatctctgtgctccaggctgaggatgaggctgattattactgttgctcatatgcaggcagcgacactttggtactcggcgga

SEQ ID NO: 805 - protein, 43 aa, Artificial Sequence
  Description of Artificial Sequence: Synthetic antibody
PDRFSGSRSGNTASLTISVLQAEDEADYYCCSYAGSDTLVLGG

SEQ ID NO: 806 - protein, 12 aa, Artificial Sequence
  Description of Artificial Sequence: Synthetic antibody
CSYAGSSTSVVF

SEQ ID NO: 807 - DNA, 129 bp, Artificial Sequence
  Description of Artificial Sequence: Synthetic antibody
gaccgattctctggctccaagtctggcaacacggcctccctgacaatctctgggctccaggctgaggacgaggctgattattactgctgctcgtatgcaggtagtagcacctctgtggtattcggcgga

SEQ ID NO: 808 - protein, 43 aa, Artificial Sequence
  Description of Artificial Sequence: Synthetic antibody
DRFSGSKSGNTASLTISGLQAEDEADYYCCSYAGSSTSVVFGG

SEQ ID NO: 809 - DNA, 129 bp, Artificial Sequence
  Description of Artificial Sequence: Synthetic antibody
aatcgcttctgtggctcgaagtctggcaactcggcctccctgacaatctctgggctccaggctgaggacgaggctgattattactgctgctcatatgcaggtagtagcacttctgtggtattcggcgga

SEQ ID NO: 810 - protein, 43 aa, Artificial Sequence
  Description of Artificial Sequence: Synthetic antibody
NRFCGSKSGNSASLTISGLQAEDEADYYCCSYAGSSTSVVFGG

SEQ ID NO: 811 - DNA, 129 bp, Artificial Sequence
  Description of Artificial Sequence: Synthetic antibody
aatcgcttctcttgctccaagtctggcaacacggcctccctgacaatctctgggctccaggctgaggacgagtctgattattactgctgctcatatgcaggtagtagcacttctgtggtattcggcgga

SEQ ID NO: 812 - protein, 43 aa, Artificial Sequence
  Description of Artificial Sequence: Synthetic antibody
NRFSCSKSGNTASLTISGLQAEDESDYYCCSYAGSSTSVVFGG

SEQ ID NO: 813 - DNA, 129 bp, Artificial Sequence
  Description of Artificial Sequence: Synthetic antibody
aatcgcttctctggctccaagtctgtcaacacggcctccctgacaatctctgggctccagtctgaggacgaggctgattattactgctgctcatatgcaggtagtagcacttctgtggtattcggcgga

SEQ ID NO: 814 - protein, 43 aa, Artificial Sequence
  Description of Artificial Sequence: Synthetic antibody
NRFSGSKSVNTASLTISGLQSEDEADYYCCSYAGSSTSVVFGG

SEQ ID NO: 815 - DNA, 129 bp, Artificial Sequence
  Description of Artificial Sequence: Synthetic antibody
aatcgcttctctggctccaagtctggcaacacggcctccctgacattctctgggctccagtctgaggacgaggctgattattactgctgctcatatgcaggtagtagcacttctgtggtattcggcgga

SEQ ID NO: 816 - protein, 43 aa, Artificial Sequence
  Description of Artificial Sequence: Synthetic antibody
NRFSGSKSGNTASLTFSGLQSEDEADYYCCSYAGSSTSVVFGG

SEQ ID NO: 817 - DNA, 129 bp, Artificial Sequence
  Description of Artificial Sequence: Synthetic antibody
aatcgcttctctggctccaagtctggcaacacggcctccctgacaatctctgggctccaggctgaggacgaggctgattattactgctgctcatatgcaggtagtagcacttctgtggtattcggcgga

SEQ ID NO: 818 - protein, 43 aa, Artificial Sequence
  Description of Artificial Sequence: Synthetic antibody
NRFSGSKSGNTASLTISGLQAEDEADYYCCSYAGSSTSVVFGG

SEQ ID NO: 819 - DNA, 129 bp, Artificial Sequence
  Description of Artificial Sequence: Synthetic antibody
aatcgcttctctggctccaagtctggcaacacggcctccctgacaatctctgggctccaggctgaggacgaggctgattattactgctgctcatatgcaggtagtagcacttccgtggtattcggcgga

SEQ ID NO: 820 - DNA, 129 bp, Artificial Sequence
  Description of Artificial Sequence: Synthetic antibody
aatcgcttctctggctccaagtctggcaacacggcctccctgacaatctctgggctccaggctgaggacgaggctgattattactgctgctcatatgcaggcagtagcacttccgtggtattcggcgga

SEQ ID NO: 821 - DNA, 129 bp, Artificial Sequence
  Description of Artificial Sequence: Synthetic antibody
aatcgcttctctggccccaagtctggcatcacggcctccctgacaatctctgggctccaggctgaggacgaggctgattattactgctgctcatatgcaggcagtagcacttccgtggtattcggcgga

SEQ ID NO: 822 - protein, 43 aa, Artificial Sequence
  Description of Artificial Sequence: Synthetic antibody
NRFSGPKSGITASLTISGLQAEDEADYYCCSYAGSSTSVVFGG

SEQ ID NO: 823 - DNA, 129 bp, Artificial Sequence
  Description of Artificial Sequence: Synthetic antibody
aatcgcttctcaggctcgaagtctggcaacacggcctccctgacaatctctgggctccaggctgaggacgaggctgattattactgctgctcatatgcaggtagtagcacttctgtggtattcggcgga

SEQ ID NO: 824 - DNA, 129 bp, Artificial Sequence
  Description of Artificial Sequence: Synthetic antibody
atccgcttctctggctccaagtctggcaacacggcctccctgacaatctctgggctccaggctgaggacgaggctgattattactgctgctcatatgcaggtagtagcacttctgtggtattcggcgga

SEQ ID NO: 825 - protein, 43 aa, Artificial Sequence
  Description of Artificial Sequence: Synthetic antibody
IRFSGSKSGNTASLTISGLQAEDEADYYCCSYAGSSTSVVFGG

SEQ ID NO: 826 - DNA, 129 bp, Artificial Sequence
  Description of Artificial Sequence: Synthetic antibody
atccgcttctctggctccaagtctggcaacacggcctccctgacaatctctgggctccaggctgaggacgaggctgattattactgctgctcatatgcaggcagtagcacttccgtggtattcggcgga

SEQ ID NO: 827 - protein, 11 aa, Artificial Sequence
  Description of Artificial Sequence: Synthetic antibody
CSFAGSYTEVF

SEQ ID NO: 828 - DNA, 129 bp, Artificial Sequence
  Description of Artificial Sequence: Synthetic antibody
cctgatcgcttctctggctccaagtctggcagcacggcctccctgaccctctctgggctccaggctgaggatgaggctgattattactgctgctcatttgcaggcagctacacggaggtattcggcgga

SEQ ID NO: 829 - protein, 43 aa, Artificial Sequence
  Description of Artificial Sequence: Synthetic antibody
PDRFSGSKSGSTASLTLSGLQAEDEADYYCCSFAGSYTEVFGG

SEQ ID NO: 830 - DNA, 129 bp, Artificial Sequence
  Description of Artificial Sequence: Synthetic antibody
gctgttcgcttctctggctccatgtctggcaacacggcctccctgaccctctctgggctccaggctgaggatgaggctgattattactgctgctcatttgcaggcagctacacggaggtattcggcgga

SEQ ID NO: 831 - protein, 43 aa, Artificial Sequence
  Description of Artificial Sequence: Synthetic antibody
AVRFSGSMSGNTASLTLSGLQAEDEADYYCCSFAGSYTEVFGG

SEQ ID NO: 832 - DNA, 129 bp, Artificial Sequence
  Description of Artificial Sequence: Synthetic antibody
gctgatcgcttctctggctccaagtctggcaacacggcctccctgaccctctctgggctccaggctgaggatgaggctgattatttctgctgctcatttgcaggcagctacacggaggtattcggcgga

SEQ ID NO: 833 - protein, 43 aa, Artificial Sequence
  Description of Artificial Sequence: Synthetic antibody
ADRFSGSKSGNTASLTLSGLQAEDEADYFCCSFAGSYTEVFGG

SEQ ID NO: 834 - DNA, 129 bp, Artificial Sequence
  Description of Artificial Sequence: Synthetic antibody
ctgatccgcttctctggctccaagtctggcaacacggcctccctgaccctctctgggctccaggctgaggatgaggctgattattactgctgctcatttgcaggcagctacacggaggtattcggcgga

SEQ ID NO: 835 - protein, 43 aa, Artificial Sequence
  Description of Artificial Sequence: Synthetic antibody
LIRFSGSKSGNTASLTLSGLQAEDEADYYCCSFAGSYTEVFGG

SEQ ID NO: 836 - DNA, 129 bp, Artificial Sequence
  Description of Artificial Sequence: Synthetic antibody
cctgatcgcttctctggctcgatgtctggcaacacggcctccctgaccctctctgggctccaggctgaggatgaggctgattattactgctgctcatttgcaggcagctacacggaggtattcggcgga

SEQ ID NO: 837 - protein, 43 aa, Artificial Sequence
  Description of Artificial Sequence: Synthetic antibody
PDRFSGSMSGNTASLTLSGLQAEDEADYYCCSFAGSYTEVFGG

SEQ ID NO: 838 - DNA, 129 bp, Artificial Sequence
  Description of Artificial Sequence: Synthetic antibody
cctgatcgcttctctggctccatgtctggcaagacggcctccctgaccctctctgggctccaggctgaggatgaggctgattattactgctgctcatttgcaggcagctacacggaggtattcggcgga

SEQ ID NO: 839 - protein, 43 aa, Artificial Sequence
  Description of Artificial Sequence: Synthetic antibody
PDRFSGSMSGKTASLTLSGLQAEDEADYYCCSFAGSYTEVFGG

SEQ ID NO: 840 - DNA, 129 bp, Artificial Sequence
  Description of Artificial Sequence: Synthetic antibody
cctgatcgcttctctggctccaagtctggcaacacggcctcccttaccctctctgtgctccaggctgaggatgaggctgattattactgctgctcatttgcaggcagctacacggaggtattcggcgga

SEQ ID NO: 841 - protein, 43 aa, Artificial Sequence
  Description of Artificial Sequence: Synthetic antibody
PDRFSGSKSGNTASLTLSVLQAEDEADYYCCSFAGSYTEVFGG

SEQ ID NO: 842 - DNA, 129 bp, Artificial Sequence
  Description of Artificial Sequence: Synthetic antibody
cctgatcgcttctctggctccaagtctggcaacacggcctccctgtccctctctgtgctccaggctgaggatgaggctgattattactgctgctcatttgcaggcagctacacggaggtattcggcgga

SEQ ID NO: 843 - protein, 43 aa, Artificial Sequence
  Description of Artificial Sequence: Synthetic antibody
PDRFSGSKSGNTASLSLSVLQAEDEADYYCCSFAGSYTEVFGG

SEQ ID NO: 844 - DNA, 129 bp, Artificial Sequence
  Description of Artificial Sequence: Synthetic antibody
cctgatcgcttctctggctccaagtctggcaacacggcctccctgaccctctctgggctccaggctgaggatgaggctgattattactgctgctcatttgcaggcagctacacggaggtattcggcgga

SEQ ID NO: 845 - protein, 43 aa, Artificial Sequence
  Description of Artificial Sequence: Synthetic antibody
PDRFSGSKSGNTASLTLSGLQAEDEADYYCCSFAGSYTEVFGG

SEQ ID NO: 846 - DNA, 129 bp, Artificial Sequence
  Description of Artificial Sequence: Synthetic antibody
ccgcttcgcttctctggctccaagtctggcaacacggcctccctgaccctctctgggctccaggctgaggatgaggctgattattactgctgctcatttgcaggcagctacacggaggtattcggcgga

SEQ ID NO: 847 - protein, 43 aa, Artificial Sequence
  Description of Artificial Sequence: Synthetic antibody
PLRFSGSKSGNTASLTLSGLQAEDEADYYCCSFAGSYTEVFGG

SEQ ID NO: 848 - DNA, 129 bp, Artificial Sequence
  Description of Artificial Sequence: Synthetic antibody
acagatcgcttctctggctccaagtctggcaacacggcctccctgaccctctctgggctccaggctgaggatgaggctgattattactgctgctcatttgcaggcagctacacggaggtattcggcgga

SEQ ID NO: 849 - protein, 43 aa, Artificial Sequence
  Description of Artificial Sequence: Synthetic antibody
TDRFSGSKSGNTASLTLSGLQAEDEADYYCCSFAGSYTEVFGG

SEQ ID NO: 850 - protein, 12 aa, Artificial Sequence
  Description of Artificial Sequence: Synthetic antibody
CSYAGSYSYVVF

SEQ ID NO: 851 - DNA, 129 bp, Artificial Sequence
  Description of Artificial Sequence: Synthetic antibody
tttcgcttctctggctccaagtctggcaacacggcctccctgaccatctctgggctccaggctgaggatgaggctgattattactgctgctcatatgcaggcagctactcttatgtggtattcggcgga

SEQ ID NO: 852 - protein, 43 aa, Artificial Sequence
  Description of Artificial Sequence: Synthetic antibody
FRFSGSKSGNTASLTISGLQAEDEADYYCCSYAGSYSYVVFGG

SEQ ID NO: 853 - DNA, 129 bp, Artificial Sequence
  Description of Artificial Sequence: Synthetic antibody
gttcgcttctctggctccaagtctggcaacacggcctccctgaccatctctgtgctccaggctgaggatgaggctgattattactgctgctcatatgcaggcagctactcctatgtggtattcggcgga

SEQ ID NO: 854 - protein, 43 aa, Artificial Sequence
  Description of Artificial Sequence: Synthetic antibody
VRFSGSKSGNTASLTISVLQAEDEADYYCCSYAGSYSYVVFGG

SEQ ID NO: 855 - DNA, 129 bp, Artificial Sequence
  Description of Artificial Sequence: Synthetic antibody
gatcgcttctctggctgcaagtctggcaacacggcctccctgaccatctcttggctccaggctgaggatgaggctgattattactgctgctcatatgcaggcagctactcctatgtggtattcggcgga

SEQ ID NO: 856 - protein, 43 aa, Artificial Sequence
  Description of Artificial Sequence: Synthetic antibody
DRFSGCKSGNTASLTISWLQAEDEADYYCCSYAGSYSYVVFGG

SEQ ID NO: 857 - DNA, 129 bp, Artificial Sequence
  Description of Artificial Sequence: Synthetic antibody
gatcgcttctctggctccaagtctggcatcacggcctccctgtccatctctgggctccaggctgaggatgaggctgattattactgctgctcatatgcaggcagctactcttatgtggtattcggcgga

SEQ ID NO: 858 - protein, 43 aa, Artificial Sequence
  Description of Artificial Sequence: Synthetic antibody
DRFSGSKSGITASLSISGLQAEDEADYYCCSYAGSYSYVVFGG

SEQ ID NO: 859 - DNA, 129 bp, Artificial Sequence
  Description of Artificial Sequence: Synthetic antibody
gatcgcttctctggctccaagtctggcatcacggcctccctgaccatctctgggctccaggctgatgatgaggctgattattactgctgctcatatgcaggcagctactcctatgtggtattcggcgga

SEQ ID NO: 860 - protein, 43 aa, Artificial Sequence
  Description of Artificial Sequence: Synthetic antibody
DRFSGSKSGITASLTISGLQADDEADYYCCSYAGSYSYVVFGG

SEQ ID NO: 861 - DNA, 129 bp, Artificial Sequence
  Description of Artificial Sequence: Synthetic antibody
gatcgcttctctggctccaagtctggcaactcggcctccctgtccatctctgggctccaggctgaggatgaggctgattattactgctgctcatatgcaggcagctactcttatgtggtattcggcgga

SEQ ID NO: 862 - protein, 43 aa, Artificial Sequence
  Description of Artificial Sequence: Synthetic antibody
DRFSGSKSGNSASLSISGLQAEDEADYYCCSYAGSYSYVVFGG

SEQ ID NO: 863 - DNA, 129 bp, Artificial Sequence
  Description of Artificial Sequence: Synthetic antibody
gatcgcttctctggctccaagtctggcaacacggcctccctgaccatctctgggctccaggctgaggatgaggctgattattactgctgctcatatgcaggcagctactcttatgtggtattcggcgga

SEQ ID NO: 864 - protein, 43 aa, Artificial Sequence
  Description of Artificial Sequence: Synthetic antibody
DRFSGSKSGNTASLTISGLQAEDEADYYCCSYAGSYSYVVFGG

SEQ ID NO: 865 - DNA, 129 bp, Artificial Sequence
  Description of Artificial Sequence: Synthetic antibody
gatcgcttctctggctccaagtctggcaacacggcctccctgaccatctctgggctccaggctgaggatgaggctgattattactgctgctcatatgcaggcagctactcctatgtggtattcggcgga

SEQ ID NO: 866 - DNA, 129 bp, Artificial Sequence
  Description of Artificial Sequence: Synthetic antibody
gttcgcttctctggctccaagtctggcaacacggcctccctgaccatctctgggctccaggctgaggatgaggctgattattactgctgctcatatgcaggcagctactcctatgtggtattcggcgga

SEQ ID NO: 867 - protein, 43 aa, Artificial Sequence
  Description of Artificial Sequence: Synthetic antibody
VRFSGSKSGNTASLTISGLQAEDEADYYCCSYAGSYSYVVFGG

SEQ ID NO: 868 - DNA, 129 bp, Artificial Sequence
  Description of Artificial Sequence: Synthetic antibody
atccgcttctctggctccaagtctggcaacacggcctccctgaccatctctgggctccaggctgaggatgaggctgattattactgctgctcatatgcaggcagctactcctatgtggtattcggcgga

SEQ ID NO: 869 - protein, 43 aa, Artificial Sequence
  Description of Artificial Sequence: Synthetic antibody
IRFSGSKSGNTASLTISGLQAEDEADYYCCSYAGSYSYVVFGG

SEQ ID NO: 870 - DNA, 129 bp, Artificial Sequence
  Description of Artificial Sequence: Synthetic antibody
atacgcttctctggctccaagtctggcaacacggcctccctgaccatctctgggctccaggctgaggatgaggctgattattactgctgctcatatgcaggcagctactcctatgtggtattcggcgga

SEQ ID NO: 871 - protein, 10 aa, Artificial Sequence
  Description of Artificial Sequence: Synthetic antibody
CSYAGSSVVF

SEQ ID NO: 872 - DNA, 129 bp, Artificial Sequence
  Description of Artificial Sequence: Synthetic antibody
tttctaatccgcttctctggctccaagtctggcaacacggcctccctgacaatctctgggctccaggctgaggacgaggctgattattactgctgctcatatgcaggtagtagcgtggtattcggcgga

SEQ ID NO: 873 - protein, 43 aa, Artificial Sequence
  Description of Artificial Sequence: Synthetic antibody
FLIRFSGSKSGNTASLTISGLQAEDEADYYCCSYAGSSVVFGG

SEQ ID NO: 874 - DNA, 129 bp, Artificial Sequence
  Description of Artificial Sequence: Synthetic antibody
gtttctaatggcttctctggctccaagtctggcaacacggcctccctgacattctctgggctccaggctgaggacgaggctgattattactgctgctcatatgcaggtagtagcgtggtattcggcgga

SEQ ID NO: 875 - protein, 43 aa, Artificial Sequence
  Description of Artificial Sequence: Synthetic antibody
VSNGFSGSKSGNTASLTFSGLQAEDEADYYCCSYAGSSVVFGG

SEQ ID NO: 876 - DNA, 129 bp, Artificial Sequence
  Description of Artificial Sequence: Synthetic antibody
gtttctaatcgcttctctggctccaagtctggcaagacggcctccctgactatctctgggctccaggctgaggacgaggctgattattactgctgctcatatgcaggtagtagcgtggtattcggcgga

SEQ ID NO: 877 - protein, 43 aa, Artificial Sequence
  Description of Artificial Sequence: Synthetic antibody
VSNRFSGSKSGKTASLTISGLQAEDEADYYCCSYAGSSVVFGG

SEQ ID NO: 878 - DNA, 129 bp, Artificial Sequence
  Description of Artificial Sequence: Synthetic antibody
gtttctaatcgcttctctggctccaagtctggcaactcggcctccctgactatctctgggctccaggctgaggacgaggctgattattactgctgctcatatgcaggtagtagcgtggtattcggcgga

SEQ ID NO: 879 - protein, 43 aa, Artificial Sequence
  Description of Artificial Sequence: Synthetic antibody
VSNRFSGSKSGNSASLTISGLQAEDEADYYCCSYAGSSVVFGG

SEQ ID NO: 880 - DNA, 129 bp, Artificial Sequence
  Description of Artificial Sequence: Synthetic antibody
gtttctaatcgcttctctggctccaagtctggcaacacggcctccctgtctatctctgggctccaggctgaggacgaggctgattattactgctgctcatatgcaggtagtagcgtggtattcggcgga

SEQ ID NO: 881 - protein, 43 aa, Artificial Sequence
  Description of Artificial Sequence: Synthetic antibody
VSNRFSGSKSGNTASLSISGLQAEDEADYYCCSYAGSSVVFGG

SEQ ID NO: 882 - DNA, 129 bp, Artificial Sequence
  Description of Artificial Sequence: Synthetic antibody
gtttctaatcgcttctctggctccaagtctggcaacacggcctccctgactatctctgggctccaggctgaggacgaggctgattattactgctgctcatatgcaggtagtagcgttgtattcggcgga

SEQ ID NO: 883 - protein, 43 aa, Artificial Sequence
  Description of Artificial Sequence: Synthetic antibody
VSNRFSGSKSGNTASLTISGLQAEDEADYYCCSYAGSSVVFGG

SEQ ID NO: 884 - DNA, 129 bp, Artificial Sequence
  Description of Artificial Sequence: Synthetic antibody
gtttctaatcgcttctctggctccaagtctggcaacacggcctccctgacaatctctgggctccaggctgaggacgaggctgattattactgctgctcatatgcaggtagtagtgtggtattcggcgga

SEQ ID NO: 885 - DNA, 129 bp, Artificial Sequence
  Description of Artificial Sequence: Synthetic antibody
gtttctaatcgcttctctggctccaagtctggcaacacggcctccctgacaatctctgggctccaggctgaggacgaggctgattattactgctgctcatatgcaggtagtagcgtggtattcggcgga

SEQ ID NO: 886 - DNA, 129 bp, Artificial Sequence
  Description of Artificial Sequence: Synthetic antibody
gtttctaatagcttctctggctccaagtctggcaacacggcctccctgacaatctcttggctccaggctgaggacgaggctgattattactgctgctcatatgcaggtagtagtgtggtattcggcgga

SEQ ID NO: 887 - protein, 43 aa, Artificial Sequence
  Description of Artificial Sequence: Synthetic antibody
VSNSFSGSKSGNTASLTISWLQAEDEADYYCCSYAGSSVVFGG

SEQ ID NO: 888 - DNA, 129 bp, Artificial Sequence
  Description of Artificial Sequence: Synthetic antibody
gtttataatcgcttctctggctccaagtctggcaagacggcctccctgacaatctctgggctccaggctgaggacgaggctgattattactgctgctcatatgcaggtagtagcgtggtattcggcgga

SEQ ID NO: 889 - protein, 43 aa, Artificial Sequence
  Description of Artificial Sequence: Synthetic antibody
VYNRFSGSKSGKTASLTISGLQAEDEADYYCCSYAGSSVVFGG

SEQ ID NO: 890 - DNA, 129 bp, Artificial Sequence
  Description of Artificial Sequence: Synthetic antibody
gttctaatccgcttctctggctccaagtctggcaacacggcctccctgacaatctctgggctccaggctgaggacgaggctgattattactgctgctcatatgcaggtagtagcgtggtattcggcgga

SEQ ID NO: 891 - protein, 43 aa, Artificial Sequence
  Description of Artificial Sequence: Synthetic antibody
VLIRFSGSKSGNTASLTISGLQAEDEADYYCCSYAGSSVVFGG

SEQ ID NO: 892 - protein, 13 aa, Artificial Sequence
  Description of Artificial Sequence: Synthetic antibody
CSYAGSSTFGVVF

SEQ ID NO: 893 - DNA, 129 bp, Artificial Sequence
  Description of Artificial Sequence: Synthetic antibody
cgcttctctggctccatgtctggcaacacggcctccctgactatctctgggctccaggctgaggacgaggctgattattactgctgctcatatgcaggtagtagcactttcggtgtggtattcggcgga

SEQ ID NO: 894 - protein, 43 aa, Artificial Sequence
  Description of Artificial Sequence: Synthetic antibody
RFSGSMSGNTASLTISGLQAEDEADYYCCSYAGSSTFGVVFGG

SEQ ID NO: 895 - DNA, 129 bp, Artificial Sequence
  Description of Artificial Sequence: Synthetic antibody
cgcttctctggctccatgtctggcaacacggcctccctgacaatctctgggctcgaggctgaggacgaggctgattattactgctgctcatatgcaggtagtagcactttcggtgtggtattcggcgga

SEQ ID NO: 896 - protein, 43 aa, Artificial Sequence
  Description of Artificial Sequence: Synthetic antibody
RFSGSMSGNTASLTISGLEAEDEADYYCCSYAGSSTFGVVFGG

SEQ ID NO: 897 - DNA, 129 bp, Artificial Sequence
  Description of Artificial Sequence: Synthetic antibody
cgcttctctggctccaagtcttgcaactcggcctccctgacaatctctgggctccaggctgaggacgaggctgattattactgctgctcatatgcaggtagtagcactttcggagtggtattcggcgga

SEQ ID NO: 898 - protein, 43 aa, Artificial Sequence
  Description of Artificial Sequence: Synthetic antibody
RFSGSKSCNSASLTISGLQAEDEADYYCCSYAGSSTFGVVFGG

SEQ ID NO: 899 - DNA, 129 bp, Artificial Sequence
  Description of Artificial Sequence: Synthetic antibody
cgcttctctggctccaagtctggctacacggcctccctgactatctctgggctccaggctgaggacgaggctgattattactgctgctcatatgcaggtagtagcactttcggtgtggtattcggcgga

SEQ ID NO: 900 - protein, 43 aa, Artificial Sequence
  Description of Artificial Sequence: Synthetic antibody
RFSGSKSGYTASLTISGLQAEDEADYYCCSYAGSSTFGVVFGG

SEQ ID NO: 901 - DNA, 129 bp, Artificial Sequence
  Description of Artificial Sequence: Synthetic antibody
cgcttctctggctccaagtctggcaactcggcctccctgagaatctctgggctccaggctgaggacgaggctgattattactgctgctcatatgcaggtagtagcactttcggagtggtattcggcgga

SEQ ID NO: 902 - protein, 43 aa, Artificial Sequence
  Description of Artificial Sequence: Synthetic antibody
RFSGSKSGNSASLRISGLQAEDEADYYCCSYAGSSTFGVVFGG

SEQ ID NO: 903 - DNA, 129 bp, Artificial Sequence
  Description of Artificial Sequence: Synthetic antibody
cgcttctctggctccaagtctggcaacacggcctccctgtctatctctgggctccaggctgaggacgaggctgattattactgctgctcatatgcaggtagtagcactttcggtgtggtattcggcgga

SEQ ID NO: 904 - protein, 43 aa, Artificial Sequence
  Description of Artificial Sequence: Synthetic antibody
RFSGSKSGNTASLSISGLQAEDEADYYCCSYAGSSTFGVVFGG

SEQ ID NO: 905 - DNA, 129 bp, Artificial Sequence
  Description of Artificial Sequence: Synthetic antibody
cgcttctctggctccaagtctggcaacacggcctccctgacaatctctgggctcgaggctgaggacgaggctgattattactgctgctcatatgcaggtagtagcactttcggtgtggttttcggcgga

SEQ ID NO: 906 - protein, 43 aa, Artificial Sequence
  Description of Artificial Sequence: Synthetic antibody
RFSGSKSGNTASLTISGLEAEDEADYYCCSYAGSSTFGVVFGG

SEQ ID NO: 907 - DNA, 129 bp, Artificial Sequence
  Description of Artificial Sequence: Synthetic antibody
cgcttctctggctccaagtctggcaacacggcctccctgacaatctctgggctccaggctgaggacgaggctgattattactgctgctcatatgcaggtagtagcactttcggtgtggtattcggcgga

SEQ ID NO: 908 - protein, 43 aa, Artificial Sequence
  Description of Artificial Sequence: Synthetic antibody
RFSGSKSGNTASLTISGLQAEDEADYYCCSYAGSSTFGVVFGG

SEQ ID NO: 909 - DNA, 129 bp, Artificial Sequence
  Description of Artificial Sequence: Synthetic antibody
cgcttctctggctccaagtctggcaacacggcctccctgacaatctctgggctccaggctgaggacgaggctgattattactgctgctcatatgcaggtagtagcactttcggagtggtattcggcgga

SEQ ID NO: 910 - DNA, 129 bp, Artificial Sequence
  Description of Artificial Sequence: Synthetic antibody
cgcttctctggctacaagtctggcaacacggcctccctgacaatctctgggctccaggctgatgacgaggctgattattactgctgctcatatgcaggtagtagcactttcggtgtggtattcggcgga

SEQ ID NO: 911 - protein, 43 aa, Artificial Sequence
  Description of Artificial Sequence: Synthetic antibody
RFSGYKSGNTASLTISGLQADDEADYYCCSYAGSSTFGVVFGG

SEQ ID NO: 912 - DNA, 129 bp, Artificial Sequence
  Description of Artificial Sequence: Synthetic antibody
tcgcttctctggctccaagtctggcaacacggcctcctgacaatctctgggctccaggctgaggacgaggctgattattactgctgctcatatgcaggtagtagcactttcggtgtggtattcggcgga

SEQ ID NO: 913 - protein, 43 aa, Artificial Sequence
  Description of Artificial Sequence: Synthetic antibody
SLLWLQVWQHGLLTISGLQAEDEADYYCCSYAGSSTFGVVFGG

SEQ ID NO: 914 - protein, 10 aa, Artificial Sequence
  Description of Artificial Sequence: Synthetic antibody
CSYAGSSGVF

SEQ ID NO: 915 - DNA, 129 bp, Artificial Sequence
  Description of Artificial Sequence: Synthetic antibody
gtttcttatcgcttctctggctccaagtgtggcaacacggcctccctgacaatctctgggctccaggctgaggacgaggctgattattactgctgctcatatgcaggtagtagcggggtgttcggcgga

SEQ ID NO: 916 - protein, 43 aa, Artificial Sequence
  Description of Artificial Sequence: Synthetic antibody
VSYRFSGSKCGNTASLTISGLQAEDEADYYCCSYAGSSGVFGG

SEQ ID NO: 917 - DNA, 129 bp, Artificial Sequence
  Description of Artificial Sequence: Synthetic antibody
gtttcttatcgcttctctggctccaagtctggcaacacggcctccctgacaatctcttggctccaggctgaggacgaggctgattattactgctgctcatatgcaggtagtagcggggtgttcggcgga

SEQ ID NO: 918 - protein, 43 aa, Artificial Sequence
  Description of Artificial Sequence: Synthetic antibody
VSYRFSGSKSGNTASLTISWLQAEDEADYYCCSYAGSSGVFGG

SEQ ID NO: 919 - DNA, 129 bp, Artificial Sequence
  Description of Artificial Sequence: Synthetic antibody
gtttcttatcgcttctctggctccaagtctggcaacacggcctccctgacaatctctgggctcgaggctgaggacgaggctgattattactgctgctcatatgcaggtagtagcggggtgttcggcgga

SEQ ID NO: 920 - protein, 43 aa, Artificial Sequence
  Description of Artificial Sequence: Synthetic antibody
VSYRFSGSKSGNTASLTISGLEAEDEADYYCCSYAGSSGVFGG

SEQ ID NO: 921 - DNA, 129 bp, Artificial Sequence
  Description of Artificial Sequence: Synthetic antibody
gtttctaatcgcttctctgtctccaagtctggcaacacggcctccctgacaacctctgggctccaggctgaggacgaggctgattattactgctgctcatatgcaggtagtagcggggtgttcggcgga

SEQ ID NO: 922 - protein, 43 aa, Artificial Sequence
  Description of Artificial Sequence: Synthetic antibody
VSNRFSVSKSGNTASLTTSGLQAEDEADYYCCSYAGSSGVFGG

SEQ ID NO: 923 - DNA, 129 bp, Artificial Sequence
  Description of Artificial Sequence: Synthetic antibody
gtttctaatcgcttctctggctccatgtctgtcaacacggcctccctgacaatctctgggctccaggctgaggacgaggctgattattactgctgctcatatgcaggtagtagcggggtgttcggcgga

SEQ ID NO: 924 - protein, 43 aa, Artificial Sequence
  Description of Artificial Sequence: Synthetic antibody
VSNRFSGSMSVNTASLTISGLQAEDEADYYCCSYAGSSGVFGG

SEQ ID NO: 925 - DNA, 129 bp, Artificial Sequence
  Description of Artificial Sequence: Synthetic antibody
gtttctaatcgcttctctggctccaagtctggcatctcggcctccctgacaatctctgggctccaggctgaggacgaggctgattattactgctgctcatatgcaggtagtagcggggtgttcggcgga

SEQ ID NO: 926 - protein, 43 aa, Artificial Sequence
  Description of Artificial Sequence: Synthetic antibody
VSNRFSGSKSGISASLTISGLQAEDEADYYCCSYAGSSGVFGG

SEQ ID NO: 927 - DNA, 129 bp, Artificial Sequence
  Description of Artificial Sequence: Synthetic antibody
gtttctaatcgcttctctggctccaagtctggcaacacggcctccctgtcaatctcttggctccaggctgaggacgaggctgattattactgctgctcatatgcaggtagtagcggggtgttcggcgga

SEQ ID NO: 928 - protein, 43 aa, Artificial Sequence
  Description of Artificial Sequence: Synthetic antibody
VSNRFSGSKSGNTASLSISWLQAEDEADYYCCSYAGSSGVFGG

SEQ ID NO: 929 - DNA, 129 bp, Artificial Sequence
  Description of Artificial Sequence: Synthetic antibody
gtttctaatcgcttctctggctccaagtctggcaacacggcctccctgacaatctctgtgctccaggctgatgacgaggctgattattactgctgctcatatgcaggtagtagcggggtgttcggcgga

SEQ ID NO: 930 - protein, 43 aa, Artificial Sequence
  Description of Artificial Sequence: Synthetic antibody
VSNRFSGSKSGNTASLTISVLQADDEADYYCCSYAGSSGVFGG

SEQ ID NO: 931 - DNA, 129 bp, Artificial Sequence
  Description of Artificial Sequence: Synthetic antibody
gtttctaatcgcttctctggctccaagtctggcaacacggcctccctgacaatctctgggctccaggctgaggacgaggctgattattactgctgctcatatgcgggtagtagcggagtgttcggcgga

SEQ ID NO: 932 - protein, 43 aa, Artificial Sequence
  Description of Artificial Sequence: Synthetic antibody
VSNRFSGSKSGNTASLTISGLQAEDEADYYCCSYAGSSGVFGG

SEQ ID NO: 933 - DNA, 129 bp, Artificial Sequence
  Description of Artificial Sequence: Synthetic antibody
gtttctaatcgcttctctggctccaagtctggcaacacggcctccctgacaatctctgggctccaggctgaggacgaggctgattattactgctgctcatatgcaggtagtagcggggtgttcggcgga

SEQ ID NO: 934 - DNA, 129 bp, Artificial Sequence
  Description of Artificial Sequence: Synthetic antibody
gttctaatccgcttctctggctccaagtctggcaacacggcctccctgacaatctctgggctccaggctgaggacgaggctgattattactgctgctcatatgcaggtagtagcggggtgttcggcgga

SEQ ID NO: 935 - protein, 43 aa, Artificial Sequence
  Description of Artificial Sequence: Synthetic antibody
VLIRFSGSKSGNTASLTISGLQAEDEADYYCCSYAGSSGVFGG

SEQ ID NO: 936 - protein, 12 aa, Artificial Sequence
  Description of Artificial Sequence: Synthetic antibody
CSYAGSYTLAVF

SEQ ID NO: 937 - DNA, 129 bp, Artificial Sequence
  Description of Artificial Sequence: Synthetic antibody
gttcgcttctctggctccaaggctggcaacacggcctccctgaccatctctgggctccaggctgaggatgaggctgattattactgctgctcatatgcaggcagctacactttggcggtattcggcgga

SEQ ID NO: 938 - protein, 43 aa, Artificial Sequence
  Description of Artificial Sequence: Synthetic antibody
VRFSGSKAGNTASLTISGLQAEDEADYYCCSYAGSYTLAVFGG

SEQ ID NO: 939 - DNA, 129 bp, Artificial Sequence
  Description of Artificial Sequence: Synthetic antibody
gatcgtttctctggctccaagtctggcaacacggcctccctgaccatctctgggctccaggctgaggatgaggctgattatcactgctgctcatatgcaggcagctacactttggcggtattcggcgga

SEQ ID NO: 940 - protein, 43 aa, Artificial Sequence
  Description of Artificial Sequence: Synthetic antibody
DRFSGSKSGNTASLTISGLQAEDEADYHCCSYAGSYTLAVFGG

SEQ ID NO: 941 - DNA, 129 bp, Artificial Sequence
  Description of Artificial Sequence: Synthetic antibody
gatcgcttctctggctcgaagtctggcaacacggcctgcctgaccatctctgggctccaggctgaggatgaggctgattattactgctgctcatatgcaggcagctacactttggcggtattcggcgga

SEQ ID NO: 942 - protein, 43 aa, Artificial Sequence
  Description of Artificial Sequence: Synthetic antibody
DRFSGSKSGNTACLTISGLQAEDEADYYCCSYAGSYTLAVFGG

SEQ ID NO: 943 - DNA, 129 bp, Artificial Sequence
  Description of Artificial Sequence: Synthetic antibody
gatcgcttctctggctccaagtcttgcaacactgcctccctgaccatctctgggctccaggctgaggatgaggctgattattactgctgctcatatgcaggcagctacactttggcggtattcggcgga

SEQ ID NO: 944 - protein, 43 aa, Artificial Sequence
  Description of Artificial Sequence: Synthetic antibody
DRFSGSKSCNTASLTISGLQAEDEADYYCCSYAGSYTLAVFGG

SEQ ID NO: 945 - DNA, 129 bp, Artificial Sequence
  Description of Artificial Sequence: Synthetic antibody
gatcgcttctctggctccaagtctggcaagacggcctccctgaccatctctgggctccaggctgtggatgaggctgattattactgctgctcatatgcaggcagctacactttggcggtattcggcgga

SEQ ID NO: 946 - protein, 43 aa, Artificial Sequence
  Description of Artificial Sequence: Synthetic antibody
DRFSGSKSGKTASLTISGLQAVDEADYYCCSYAGSYTLAVFGG

SEQ ID NO: 947 - DNA, 129 bp, Artificial Sequence
  Description of Artificial Sequence: Synthetic antibody
gatcgcttctctggctccaagtctggcaactcggcctccctgaccatctctgggctgcaggctgaggatgaggctgattattactgctgctcatatgcaggcagctacactttggcggtattcggcgga

SEQ ID NO: 948 - protein, 43 aa, Artificial Sequence
  Description of Artificial Sequence: Synthetic antibody
DRFSGSKSGNSASLTISGLQAEDEADYYCCSYAGSYTLAVFGG

SEQ ID NO: 949 - DNA, 129 bp, Artificial Sequence
  Description of Artificial Sequence: Synthetic antibody
gatcgcttctctggctccaagtctggcaacacggcctccctgaccatctctgggctccaggctgaggatgaggctgattattactgctgctcatatgcaggcagctacactttggcggtattcggcgga

SEQ ID NO: 950 - protein, 43 aa, Artificial Sequence
  Description of Artificial Sequence: Synthetic antibody
DRFSGSKSGNTASLTISGLQAEDEADYYCCSYAGSYTLAVFGG

SEQ ID NO: 951 - DNA, 129 bp, Artificial Sequence
  Description of Artificial Sequence: Synthetic antibody
gatcgcttctctggctccaaggctggcaactcggcctccctgaccatctctgggctccaggctgaggatgaggctgattattactgctgctcatatgcaggcagctacactttggcggtattcggcgga

SEQ ID NO: 952 - protein, 43 aa, Artificial Sequence
  Description of Artificial Sequence: Synthetic antibody
DRFSGSKAGNSASLTISGLQAEDEADYYCCSYAGSYTLAVFGG

SEQ ID NO: 953 - DNA, 129 bp, Artificial Sequence
  Description of Artificial Sequence: Synthetic antibody
gatagcttctctggctccaagtcttgcaacacggcctccctgaccatctctgggctccaggctgaggatgaggctgattattactgctgctcatatgcaggcagctacactttggcggtattcggcgga

SEQ ID NO: 954 - protein, 43 aa, Artificial Sequence
  Description of Artificial Sequence: Synthetic antibody
DSFSGSKSCNTASLTISGLQAEDEADYYCCSYAGSYTLAVFGG

SEQ ID NO: 955 - DNA, 129 bp, Artificial Sequence
  Description of Artificial Sequence: Synthetic antibody
ttccgcttctctggctccaagtctggcaacacggcctccctgaccatctctgggctccaggctgaggatgaggctgattattactgctgctcatatgcaggcagctacactttggcggtattcggcgga

SEQ ID NO: 956 - protein, 43 aa, Artificial Sequence
  Description of Artificial Sequence: Synthetic antibody
FRFSGSKSGNTASLTISGLQAEDEADYYCCSYAGSYTLAVFGG

SEQ ID NO: 957 - DNA, 129 bp, Artificial Sequence
  Description of Artificial Sequence: Synthetic antibody
atccgcttctctggctccaagtctggcaacacggcctccctgaccatctctgggctccaggctgaggatgaggctgattattactgctgctcatatgcaggcagctacactttggcggtattcggcgga

SEQ ID NO: 958 - protein, 43 aa, Artificial Sequence
  Description of Artificial Sequence: Synthetic antibody
IRFSGSKSGNTASLTISGLQAEDEADYYCCSYAGSYTLAVFGG

SEQ ID NO: 959 - protein, 12 aa, Artificial Sequence
  Description of Artificial Sequence: Synthetic antibody
CSYAGSYTFAVF

SEQ ID NO: 960 - DNA, 129 bp, Artificial Sequence
  Description of Artificial Sequence: Synthetic antibody
gttcgcttctctggcttcaagtctggcaacacggcctccctgaccatctctgtgctccaggctgaggatgaggctgattattactgctgctcatatgcaggcagctacactttcgcggtgttcggcgga

SEQ ID NO: 961 - protein, 43 aa, Artificial Sequence
  Description of Artificial Sequence: Synthetic antibody
VRFSGFKSGNTASLTISVLQAEDEADYYCCSYAGSYTFAVFGG

SEQ ID NO: 962 - DNA, 129 bp, Artificial Sequence
  Description of Artificial Sequence: Synthetic antibody
gatctcttctcttgctccaagtctggcaacacggcctccctgaccatctctgggctccaggctgaggatgaggctgattattactgctgctcatatgcaggcagctacactttcgcggtgttcggcgga

SEQ ID NO: 963 - protein, 43 aa, Artificial Sequence
  Description of Artificial Sequence: Synthetic antibody
DLFSCSKSGNTASLTISGLQAEDEADYYCCSYAGSYTFAVFGG

SEQ ID NO: 964 - DNA, 129 bp, Artificial Sequence
  Description of Artificial Sequence: Synthetic antibody
gatcgcttctctggcttcaagtctggcaacacggcctccctgaccatctctgggctccaggctgaggatgaggctgattattactgctgctcatatgcaggcagctacactttcgcggtgttcggcgga

SEQ ID NO: 965 - protein, 43 aa, Artificial Sequence
  Description of Artificial Sequence: Synthetic antibody
DRFSGFKSGNTASLTISGLQAEDEADYYCCSYAGSYTFAVFGG

SEQ ID NO: 966 - DNA, 129 bp, Artificial Sequence
  Description of Artificial Sequence: Synthetic antibody
gatcgcttctctggctccaagtctggcaagacggcctcccagaccatctctgggctccaggctgaggatgaggctgattattactgctgctcatatgcaggcagctacactttcgcggtgttcggcgga

SEQ ID NO: 967 - protein, 43 aa, Artificial Sequence
  Description of Artificial Sequence: Synthetic antibody
DRFSGSKSGKTASQTISGLQAEDEADYYCCSYAGSYTFAVFGG

SEQ ID NO: 968 - DNA, 129 bp, Artificial Sequence
  Description of Artificial Sequence: Synthetic antibody
gatcgcttctctggctccaagtctggcaacacggcctgcctgaccatctctgggctccaggctgaggatgatgctgattattactgctgctcatatgcaggcagctacactttcgcggtgttcggcgga

SEQ ID NO: 969 - protein, 43 aa, Artificial Sequence
  Description of Artificial Sequence: Synthetic antibody
DRFSGSKSGNTACLTISGLQAEDDADYYCCSYAGSYTFAVFGG

SEQ ID NO: 970 - DNA, 129 bp, Artificial Sequence
  Description of Artificial Sequence: Synthetic antibody
gatcgcttctctggctccaagtctggcaacacggcctccctgaccatctctgtgctccaggctgaggatgatgctgattattactgctgctcatatgcaggcagctacactttcgcggtgttcggcgga

SEQ ID NO: 971 - protein, 43 aa, Artificial Sequence
  Description of Artificial Sequence: Synthetic antibody
DRFSGSKSGNTASLTISVLQAEDDADYYCCSYAGSYTFAVFGG

SEQ ID NO: 972 - DNA, 129 bp, Artificial Sequence
  Description of Artificial Sequence: Synthetic antibody
gatcgcttctctggctccaagtctggcaacacggcctccctgaccatctctgggctccaggctgaggatgaggctgattattactgctgctcatatgcaggcagctacactttcgcggtgttcggcgga

SEQ ID NO: 973 - protein, 43 aa, Artificial Sequence
  Description of Artificial Sequence: Synthetic antibody
DRFSGSKSGNTASLTISGLQAEDEADYYCCSYAGSYTFAVFGG

SEQ ID NO: 974 - DNA, 129 bp, Artificial Sequence
  Description of Artificial Sequence: Synthetic antibody
gatcgcttctctggctccaaggctcgcaacacggcctccctgaccatctctgggctccaggctgaggatgaggctgattattactgctgctcatatgcaggcagctacactttcgcggtgttcggcgga

SEQ ID NO: 975 - protein, 43 aa, Artificial Sequence
  Description of Artificial Sequence: Synthetic antibody
DRFSGSKARNTASLTISGLQAEDEADYYCCSYAGSYTFAVFGG

SEQ ID NO: 976 - DNA, 129 bp, Artificial Sequence
  Description of Artificial Sequence: Synthetic antibody
gatcgcttccctggctccaagtctggcaacacggcctccctgaccatctctgggctccgggctgaggatgaggctgattattactgctgctcatatgcaggcagctacactttcgcggtgttcggcgga

SEQ ID NO: 977 - protein, 43 aa, Artificial Sequence
  Description of Artificial Sequence: Synthetic antibody
DRFPGSKSGNTASLTISGLRAEDEADYYCCSYAGSYTFAVFGG

SEQ ID NO: 978 - DNA, 129 bp, Artificial Sequence
  Description of Artificial Sequence: Synthetic antibody
ttacgcttctctggctccaagtctggcaacacggcctccctgaccatctctgggctccaggctgaggatgaggctgattattactgctgctcatatgcaggcagctacactttcgcggtgttcggcgga

SEQ ID NO: 979 - protein, 43 aa, Artificial Sequence
  Description of Artificial Sequence: Synthetic antibody
LRFSGSKSGNTASLTISGLQAEDEADYYCCSYAGSYTFAVFGG

SEQ ID NO: 980 - DNA, 129 bp, Artificial Sequence
  Description of Artificial Sequence: Synthetic antibody
atccgcttctctggctccaagtctggcaacacggcctccctgaccatctctgggctccaggctgaggatgaggctgattattactgctgctcatatgcaggcagctacactttcgcggtgttcggcgga

SEQ ID NO: 981 - protein, 43 aa, Artificial Sequence
  Description of Artificial Sequence: Synthetic antibody
IRFSGSKSGNTASLTISGLQAEDEADYYCCSYAGSYTFAVFGG

SEQ ID NO: 982 - protein, 13 aa, Artificial Sequence
  Description of Artificial Sequence: Synthetic antibody
CSYAGSYTFDVVF

SEQ ID NO: 983 - DNA, 129 bp, Artificial Sequence
  Description of Artificial Sequence: Synthetic antibody
cgcttctctggctgcaagtctggcaacacggcctccctgaccatctctgggctgcaggctgaggatgaggctgattattactgctgctcatatgcaggcagctacactttcgatgtggtattcggcgga

SEQ ID NO: 984 - protein, 43 aa, Artificial Sequence
  Description of Artificial Sequence: Synthetic antibody
RFSGCKSGNTASLTISGLQAEDEADYYCCSYAGSYTFDVVFGG

SEQ ID NO: 985 - DNA, 129 bp, Artificial Sequence
  Description of Artificial Sequence: Synthetic antibody
cgcttctctggctcgatgtctggcaacacggcctccctgaccatctctgggctccaggctgaggatgaggctgattattactgctgctcatatgcaggcagctacactttcgatgtggtattcggcgga

SEQ ID NO: 986 - protein, 43 aa, Artificial Sequence
  Description of Artificial Sequence: Synthetic antibody
RFSGSMSGNTASLTISGLQAEDEADYYCCSYAGSYTFDVVFGG

SEQ ID NO: 987 - DNA, 129 bp, Artificial Sequence
  Description of Artificial Sequence: Synthetic antibody
cgcttctctggctccaagtctgtcaacatggcctccctgaccatctctgggctccaggctgaggatgaggctgattattactgctgctcatatgcaggcagctacactttcgatgtggtattcggcgga

SEQ ID NO: 988 - protein, 43 aa, Artificial Sequence
  Description of Artificial Sequence: Synthetic antibody
RFSGSKSVNMASLTISGLQAEDEADYYCCSYAGSYTFDVVFGG

SEQ ID NO: 989 - DNA, 129 bp, Artificial Sequence
  Description of Artificial Sequence: Synthetic antibody
cgcttctctggctccaagtctgtcaacacggcctccctgaccatctctgggctccaggctgaggatgaggctgattattactgctgctcatatgcaggcagctacactttcgatgttgtattcggcgga

SEQ ID NO: 990 - protein, 43 aa, Artificial Sequence
  Description of Artificial Sequence: Synthetic antibody
RFSGSKSVNTASLTISGLQAEDEADYYCCSYAGSYTFDVVFGG

SEQ ID NO: 991 - DNA, 129 bp, Artificial Sequence
  Description of Artificial Sequence: Synthetic antibody
cgcttctctggctccaagtctggcaactcggcctccctgaccatctctgggctcgaggctgaggatgaggctgattattactgctgctcatatgcaggcagctacactttcgatgtggtattcggcgga

SEQ ID NO: 992 - protein, 43 aa, Artificial Sequence
  Description of Artificial Sequence: Synthetic antibody
RFSGSKSGNSASLTISGLEAEDEADYYCCSYAGSYTFDVVFGG

SEQ ID NO: 993 - DNA, 129 bp, Artificial Sequence
  Description of Artificial Sequence: Synthetic antibody
cgcttctctggctccaagtctggcaacacggcctccctggccatctctgggctccaggctgaggataaggctgattattactgctgctcatatgcaggcagctacactttcgatgtggtattcggcgga

SEQ ID NO: 994 - protein, 43 aa, Artificial Sequence
  Description of Artificial Sequence: Synthetic antibody
RFSGSKSGNTASLAISGLQAEDKADYYCCSYAGSYTFDVVFGG

SEQ ID NO: 995 - DNA, 129 bp, Artificial Sequence
  Description of Artificial Sequence: Synthetic antibody
cgcttctctggctccaagtctggcaacacggcctccctgaccatctctgggctccaggctgaggatgaggctgattattactgctgctcatatgcaggcagctacactttcgatgtggtattcggcgga

SEQ ID NO: 996 - protein, 43 aa, Artificial Sequence
  Description of Artificial Sequence: Synthetic antibody
RFSGSKSGNTASLTISGLQAEDEADYYCCSYAGSYTFDVVFGG

SEQ ID NO: 997 - DNA, 129 bp, Artificial Sequence
  Description of Artificial Sequence: Synthetic antibody
cgcttctctggctccaagtccggcaacacggcctccctgactatctctgggctccaggctgaggatgaggctgattattactgctgctcatatgcaggcagctacactttcgatgtggtattcggcgga

SEQ ID NO: 998 - DNA, 129 bp, Artificial Sequence
  Description of Artificial Sequence: Synthetic antibody
tcgcttctctggctccaagtctggcaacacggcctcctgaccatctctgggctccaggctgaggatgaggctgattattactgctgctcatatgcaggcagctacactttcgatgtggtattcggcgga

SEQ ID NO: 999 - protein, 43 aa, Artificial Sequence
  Description of Artificial Sequence: Synthetic antibody
SLLWLQVWQHGLLTISGLQAEDEADYYCCSYAGSYTFDVVFGG

SEQ ID NO: 1000 - DNA, 129 bp, Artificial Sequence
  Description of Artificial Sequence: Synthetic antibody
tcgcttctctggctccaagtctggcaacacggcctccctgaccatctctggctccaggctgaggatgaggctgattattactgctgctcatatgcaggcagctacactttcgatgtggtattcggcgga

SEQ ID NO: 1001 - protein, 43 aa, Artificial Sequence
  Description of Artificial Sequence: Synthetic antibody
SLLWLQVWQHGLPDHLWLQAEDEADYYCCSYAGSYTFDVVFGG

SEQ ID NO: 1002 - protein, 10 aa, Artificial Sequence
  Description of Artificial Sequence: Synthetic antibody
CSYAGSSTLF

SEQ ID NO: 1003 - DNA, 129 bp, Artificial Sequence
  Description of Artificial Sequence: Synthetic antibody
tttctaatccgcttctctggctccaagtctggcaacacggcctccctgacaatctctgggctccaggctgaggacgaggctgattattactgctgctcatatgcaggtagtagcactttattcggcgga

SEQ ID NO: 1004 - protein, 43 aa, Artificial Sequence
  Description of Artificial Sequence: Synthetic antibody
FLIRFSGSKSGNTASLTISGLQAEDEADYYCCSYAGSSTLFGG

SEQ ID NO: 1005 - DNA, 129 bp, Artificial Sequence
  Description of Artificial Sequence: Synthetic antibody
gtttctaatctcttctctggctccaagtcttgcaacacggcctccctgacaatctctgggctccaggctgaggacgaggctgattattactgctgctcatatgcaggtagtagcactttattcggcgga

SEQ ID NO: 1006 - protein, 43 aa, Artificial Sequence
  Description of Artificial Sequence: Synthetic antibody
VSNLFSGSKSCNTASLTISGLQAEDEADYYCCSYAGSSTLFGG

SEQ ID NO: 1007 - DNA, 129 bp, Artificial Sequence
  Description of Artificial Sequence: Synthetic antibody
gtttctaatcgcttctctgtctccaagtctggaaacacggcctccctgacaatctctgggctccaggctgaggacgaggctgattattactgctgctcatatgcaggtagtagcactttattcggcgga

SEQ ID NO: 1008 - protein, 43 aa, Artificial Sequence
  Description of Artificial Sequence: Synthetic antibody
VSNRFSVSKSGNTASLTISGLQAEDEADYYCCSYAGSSTLFGG

SEQ ID NO: 1009 - DNA, 129 bp, Artificial Sequence
  Description of Artificial Sequence: Synthetic antibody
gtttctaatcgcttctctggctccaagtcttgcatcacggcctccctgacaatctctgggctccaggctgaggacgaggctgattattactgctgctcatatgcaggtagtagcactttattcggcgga

SEQ ID NO: 1010 - protein, 43 aa, Artificial Sequence
  Description of Artificial Sequence: Synthetic antibody
VSNRFSGSKSCITASLTISGLQAEDEADYYCCSYAGSSTLFGG

SEQ ID NO: 1011 - DNA, 129 bp, Artificial Sequence
  Description of Artificial Sequence: Synthetic antibody
gtttctaatcgcttctctggctccaagtctggcaagactgcctccctgacaatctctgggctccaggctgaggacgaggctgattattactgctgctcatatgcaggtagtagcactttattcggcgga

SEQ ID NO: 1012 - protein, 43 aa, Artificial Sequence
  Description of Artificial Sequence: Synthetic antibody
VSNRFSGSKSGKTASLTISGLQAEDEADYYCCSYAGSSTLFGG

SEQ ID NO: 1013 - DNA, 129 bp, Artificial Sequence
  Description of Artificial Sequence: Synthetic antibody
gtttctaatcgcttctctggctccaagtctggcaacactgcctccctgacaatctctcggctccaggctgaggacgaggctgattattactgctgctcatatgcaggtagtagcactttattcggcgga

SEQ ID NO: 1014 - protein, 43 aa, Artificial Sequence
  Description of Artificial Sequence: Synthetic antibody
VSNRFSGSKSGNTASLTISRLQAEDEADYYCCSYAGSSTLFGG

SEQ ID NO: 1015 - DNA, 129 bp, Artificial Sequence
  Description of Artificial Sequence: Synthetic antibody
gtttctaatcgcttctctggctccaagtctggcaacacggcctccctgacaatctctgtgctccaggctgatgacgaggctgattattactgctgctcatatgcaggtagtagcactttattcggcgga

SEQ ID NO: 1016 - protein, 43 aa, Artificial Sequence
  Description of Artificial Sequence: Synthetic antibody
VSNRFSGSKSGNTASLTISVLQADDEADYYCCSYAGSSTLFGG

SEQ ID NO: 1017 - DNA, 129 bp, Artificial Sequence
  Description of Artificial Sequence: Synthetic antibody
gtttctaatcgcttctctggctccaagtctggcaacacggcctccctgacaatctctgggctccaggctgaggacgaggctgattattactgctgctcatatgcaggtagtagcactttattcggcgga

SEQ ID NO: 1018 - protein, 43 aa, Artificial Sequence
  Description of Artificial Sequence: Synthetic antibody
VSNRFSGSKSGNTASLTISGLQAEDEADYYCCSYAGSSTLFGG

SEQ ID NO: 1019 - DNA, 129 bp, Artificial Sequence
  Description of Artificial Sequence: Synthetic antibody
gtttctaatcgcttctctggctccaagtccggcaacacggcctccctgacaatctctgggctccaggctgaggacgaggctgatcattactgctgctcatatgcaggtagtagcactttattcggcgga

SEQ ID NO: 1020 - protein, 43 aa, Artificial Sequence
  Description of Artificial Sequence: Synthetic antibody
VSNRFSGSKSGNTASLTISGLQAEDEADHYCCSYAGSSTLFGG

SEQ ID NO: 1021 - DNA, 129 bp, Artificial Sequence
  Description of Artificial Sequence: Synthetic antibody
gttcttattcgcttctctggctccaagtctggcaacacggcctccctgacaatctctgggctccaggctgaggacgaggctgattattactgctgctcatatgcaggtagtagcactttattcggcgga

SEQ ID NO: 1022 - protein, 43 aa, Artificial Sequence
  Description of Artificial Sequence: Synthetic antibody
VLIRFSGSKSGNTASLTISGLQAEDEADYYCCSYAGSSTLFGG

SEQ ID NO: 1023 - protein, 11 aa, Artificial Sequence
  Description of Artificial Sequence: Synthetic antibody
CSYAGSSSYVF

SEQ ID NO: 1024 - DNA, 129 bp, Artificial Sequence
  Description of Artificial Sequence: Synthetic antibody
tctcatcgcttctctggctccaaggctggcaacacggcctccctgacaatctctgggctccaggctgaggacgaggctgattattactgctgctcatatgcaggtagtagctcttatgtcttcggaact

SEQ ID NO: 1025 - protein, 43 aa, Artificial Sequence
  Description of Artificial Sequence: Synthetic antibody
SHRFSGSKAGNTASLTISGLQAEDEADYYCCSYAGSSSYVFGT

SEQ ID NO: 1026 - DNA, 129 bp, Artificial Sequence
  Description of Artificial Sequence: Synthetic antibody
tctaatcgcttctctggctccaagtctggcatcacggcctccctgactatctctgggctccaggctgaggacgaggctgattattactgctgctcatatgcaggtagtagctcttatgtcttcggaact

SEQ ID NO: 1027 - protein, 43 aa, Artificial Sequence
  Description of Artificial Sequence: Synthetic antibody
SNRFSGSKSGITASLTISGLQAEDEADYYCCSYAGSSSYVFGT

SEQ ID NO: 1028 - DNA, 129 bp, Artificial Sequence
  Description of Artificial Sequence: Synthetic antibody
tctaatcgcttctctggctccaagtctggcatcacggcctccctgacaatctctgggctccagtctgaggacgaggctgattattactgctgctcatatgcaggtagtagctcttatgtcttcggaact

SEQ ID NO: 1029 - protein, 43 aa, Artificial Sequence
  Description of Artificial Sequence: Synthetic antibody
SNRFSGSKSGITASLTISGLQSEDEADYYCCSYAGSSSYVFGT

SEQ ID NO: 1030 - DNA, 129 bp, Artificial Sequence
  Description of Artificial Sequence: Synthetic antibody
tctaatcgcttctctggctccaagtctggcaactcggcctccctgactatctctgggctccaggctgaggacgaggctgattattactgctgctcatatgcaggtagtagctcttatgtcttcggaact

SEQ ID NO: 1031 - protein, 43 aa, Artificial Sequence
  Description of Artificial Sequence: Synthetic antibody
SNRFSGSKSGNSASLTISGLQAEDEADYYCCSYAGSSSYVFGT

SEQ ID NO: 1032 - DNA, 129 bp, Artificial Sequence
  Description of Artificial Sequence: Synthetic antibody
tctaatcgcttctctggctccaagtctggcaacacggcctgcctgtcaatctctgggctccaggctgaggacgaggctgattattactgctgctcatatgcaggtagtagctcttatgtcttcggaact

SEQ ID NO: 1033 - protein, 43 aa, Artificial Sequence
  Description of Artificial Sequence: Synthetic antibody
SNRFSGSKSGNTACLSISGLQAEDEADYYCCSYAGSSSYVFGT

SEQ ID NO: 1034 - DNA, 129 bp, Artificial Sequence
  Description of Artificial Sequence: Synthetic antibody
tctaatcgcttctctggctccaagtctggcaacacggcctccctgacaatctctgggctccaggctgaggacgaggctgattattactgctgctcatatgcaggtagtagctcttatgtcttcggaact

SEQ ID NO: 1035 - protein, 43 aa, Artificial Sequence
  Description of Artificial Sequence: Synthetic antibody
SNRFSGSKSGNTASLTISGLQAEDEADYYCCSYAGSSSYVFGT

SEQ ID NO: 1036 - DNA, 129 bp, Artificial Sequence
  Description of Artificial Sequence: Synthetic antibody
tctaatcgcttctctggctccaaggctggcaacacggcctccctgacaatctctgggctccaggctgaggacgatgctgattattactgctgctcatatgcaggtagtagctcttatgtcttcggaact

SEQ ID NO: 1037 - protein, 43 aa, Artificial Sequence
  Description of Artificial Sequence: Synthetic antibody
SNRFSGSKAGNTASLTISGLQAEDDADYYCCSYAGSSSYVFGT

SEQ ID NO: 1038 - DNA, 129 bp, Artificial Sequence
  Description of Artificial Sequence: Synthetic antibody
tctaatcgcttccctggctccaagtctggcaacacggcctccctgacaatctctgggctccaggctggggacgaggctgattattactgctgctcatatgcaggtagtagctcttatgtcttcggaact

SEQ ID NO: 1039 - protein, 43 aa, Artificial Sequence
  Description of Artificial Sequence: Synthetic antibody
SNRFPGSKSGNTASLTISGLQAGDEADYYCCSYAGSSSYVFGT

SEQ ID NO: 1040 - DNA, 129 bp, Artificial Sequence
  Description of Artificial Sequence: Synthetic antibody
ctaatccgcttctctggctccaagtctggcaacacggcctccctgacaatctctgggctccaggctgaggacgaggctgattattactgctgctcatatgcaggtagtagctcttatgtcttcggaact

SEQ ID NO: 1041 - protein, 43 aa, Artificial Sequence
  Description of Artificial Sequence: Synthetic antibody
LIRFSGSKSGNTASLTISGLQAEDEADYYCCSYAGSSSYVFGT

SEQ ID NO: 1042 - DNA, 129 bp, Artificial Sequence
  Description of Artificial Sequence: Synthetic antibody
ctaatacgcttctctggctccaagtctggcaacacggcctccctgacaatctctgggctccaggctgaggacgaggctgattattactgctgctcatatgcaggtagtagctcttatgtcttcggaact

SEQ ID NO: 1043 - protein, 12 aa, Artificial Sequence
  Description of Artificial Sequence: Synthetic antibody
CSYAGSYTSVVF

SEQ ID NO: 1044 - DNA, 129 bp, Artificial Sequence
  Description of Artificial Sequence: Synthetic antibody
gatcgcttctctggctccaagtctggcatctcggcctccctgaccatctctgggctccaggctgaggatgaggctgattattactgctgctcatatgcaggcagctacacttccgtggtattcggcgga

SEQ ID NO: 1045 - protein, 43 aa, Artificial Sequence
  Description of Artificial Sequence: Synthetic antibody
DRFSGSKSGISASLTISGLQAEDEADYYCCSYAGSYTSVVFGG

SEQ ID NO: 1046 - DNA, 129 bp, Artificial Sequence
  Description of Artificial Sequence: Synthetic antibody
gatcgcttctctggctccaagtctggcatcacggcctccctgaccttctctgggctccaggctgaggatgaggctgattattactgctgctcatatgcaggcagctacacttccgtggtattcggcgga

SEQ ID NO: 1047 - protein, 43 aa, Artificial Sequence
  Description of Artificial Sequence: Synthetic antibody
DRFSGSKSGITASLTFSGLQAEDEADYYCCSYAGSYTSVVFGG

SEQ ID NO: 1048 - DNA, 129 bp, Artificial Sequence
  Description of Artificial Sequence: Synthetic antibody
gatcgcttctctggctccaagtctggcaacacggcctcccttaccatctctgggctccaggctgaggatgtggctgattattactgctgctcatatgcaggcagctacacttccgtggtattcggcgga

SEQ ID NO: 1049 - protein, 43 aa, Artificial Sequence
  Description of Artificial Sequence: Synthetic antibody
DRFSGSKSGNTASLTISGLQAEDVADYYCCSYAGSYTSVVFGG

SEQ ID NO: 1050 - DNA, 129 bp, Artificial Sequence
  Description of Artificial Sequence: Synthetic antibody
gatcgcttctctggctccaagtctggcaacacggcctccctgaccatctctgggctcctggctgaggttgaggctgattattactgctgctcatatgcaggcagctacacttccgtggtattcggcgga

SEQ ID NO: 1051 - protein, 43 aa, Artificial Sequence
  Description of Artificial Sequence: Synthetic antibody
DRFSGSKSGNTASLTISGLLAEVEADYYCCSYAGSYTSVVFGG

SEQ ID NO: 1052 - DNA, 129 bp, Artificial Sequence
  Description of Artificial Sequence: Synthetic antibody
gatcgcttctctggctccaagtctggcaacacggcctccctgaccatctctgggctcctggctgaggatgaggctgattattactgctgctcatatgcaggcagctacacttccgttgtattcggcgga

SEQ ID NO: 1053 - protein, 43 aa, Artificial Sequence
  Description of Artificial Sequence: Synthetic antibody
DRFSGSKSGNTASLTISGLLAEDEADYYCCSYAGSYTSVVFGG

SEQ ID NO: 1054 - DNA, 129 bp, Artificial Sequence
  Description of Artificial Sequence: Synthetic antibody
gatcgcttctctggctccaagtctggcaacacggcctccctgaccatctctgggctccaggctgaggatgagtctgattattactgctgctcatatgcaggcagctacacttccgttgtattcggcgga

SEQ ID NO: 1055 - protein, 43 aa, Artificial Sequence
  Description of Artificial Sequence: Synthetic antibody
DRFSGSKSGNTASLTISGLQAEDESDYYCCSYAGSYTSVVFGG

SEQ ID NO: 1056 - DNA, 129 bp, Artificial Sequence
  Description of Artificial Sequence: Synthetic antibody
gatcgcttctctggctccaagtctggcaacacggcctccctgaccatctctgggctccaggctgaggatgaggctgattattactgctgctcatatgcaggcagctacacttccgtggtattcggcgga

SEQ ID NO: 1057 - protein, 43 aa, Artificial Sequence
  Description of Artificial Sequence: Synthetic antibody
DRFSGSKSGNTASLTISGLQAEDEADYYCCSYAGSYTSVVFGG

SEQ ID NO: 1058 - DNA, 129 bp, Artificial Sequence
  Description of Artificial Sequence: Synthetic antibody
tttcgcttctctggctccaagtctggcaacacggcctccctgaccatctctgggctccaggctgaggatgaggctgattattactgctgctcatatgcaggcagctacacttccgtggtattcggcgga

SEQ ID NO: 1059 - protein, 43 aa, Artificial Sequence
  Description of Artificial Sequence: Synthetic antibody
FRFSGSKSGNTASLTISGLQAEDEADYYCCSYAGSYTSVVFGG

SEQ ID NO: 1060 - DNA, 129 bp, Artificial Sequence
  Description of Artificial Sequence: Synthetic antibody
ttccgcttctctggctccaagtctggcaacacggcctccctgaccatctctgggctccaggctgaggatgaggctgattattactgctgctcatatgcaggcagctacacttccgtggtattcggcgga

SEQ ID NO: 1061 - DNA, 129 bp, Artificial Sequence
  Description of Artificial Sequence: Synthetic antibody
atccgcttctctggctccaagtctggcaacacggcctccctgaccatctctgggctccaggctgaggatgaggctgattattactgctgctcatatgcaggcagctacacttccgtggtattcggcgga

SEQ ID NO: 1062 - protein, 43 aa, Artificial Sequence
  Description of Artificial Sequence: Synthetic antibody
IRFSGSKSGNTASLTISGLQAEDEADYYCCSYAGSYTSVVFGG

SEQ ID NO: 1063 - protein, 11 aa, Artificial Sequence
  Description of Artificial Sequence: Synthetic antibody
CSYAGSYTVVF

SEQ ID NO: 1064 - DNA, 129 bp, Artificial Sequence
  Description of Artificial Sequence: Synthetic antibody
ctgattcgcttctctggctccaagtctggcaacacggcctccctgaccatctctgggctccaggctgaggatgaggctgattattactgctgctcatatgcaggcagctacactgtggtattcggcgga

SEQ ID NO: 1065 - protein, 43 aa, Artificial Sequence
  Description of Artificial Sequence: Synthetic antibody
LIRFSGSKSGNTASLTISGLQAEDEADYYCCSYAGSYTVVFGG

SEQ ID NO: 1066 - DNA, 129 bp, Artificial Sequence
  Description of Artificial Sequence: Synthetic antibody
cgtgatcgcttctctggctccaagtctggcaacacggcctccctgaccatctctgggctcctggctgaggatgaggctgattattactgctgctcatatgcaggcagctacactgtggtattcggcgga

SEQ ID NO: 1067 - protein, 43 aa, Artificial Sequence
  Description of Artificial Sequence: Synthetic antibody
RDRFSGSKSGNTASLTISGLLAEDEADYYCCSYAGSYTVVFGG

SEQ ID NO: 1068 - DNA, 129 bp, Artificial Sequence
  Description of Artificial Sequence: Synthetic antibody
cctgatggcttctctggctccaagtctggcaacacggcctccctgaccttctctgggctccaggctgaggatgaggctgattattactgctgctcatatgcaggcagctacactgtggtattcggcgga

SEQ ID NO: 1069 - protein, 43 aa, Artificial Sequence
  Description of Artificial Sequence: Synthetic antibody
PDGFSGSKSGNTASLTFSGLQAEDEADYYCCSYAGSYTVVFGG

SEQ ID NO: 1070 - DNA, 129 bp, Artificial Sequence
  Description of Artificial Sequence: Synthetic antibody
cctgatcgcttctctggctccaagtctggctactcggcctccctgaccatctctgggctccaggctgaggatgaggctgattattactgctgctcatatgcaggcagctacactgtggtattcggcgga

SEQ ID NO: 1071 - protein, 43 aa, Artificial Sequence
  Description of Artificial Sequence: Synthetic antibody
PDRFSGSKSGYSASLTISGLQAEDEADYYCCSYAGSYTVVFGG

SEQ ID NO: 1072 - DNA, 129 bp, Artificial Sequence
  Description of Artificial Sequence: Synthetic antibody
cctgatcgcttctctggctccaagtctggctacacggcctccctgacgatctctgggctccaggctgaggatgaggctgattattactgctgctcatatgcaggcagctacactgtggtattcggcgga

SEQ ID NO: 1073 - protein, 43 aa, Artificial Sequence
  Description of Artificial Sequence: Synthetic antibody
PDRFSGSKSGYTASLTISGLQAEDEADYYCCSYAGSYTVVFGG

SEQ ID NO: 1074 - DNA, 129 bp, Artificial Sequence
  Description of Artificial Sequence: Synthetic antibody
cctgatcgcttctctggctccaagtctggcaactcggcctccctgaccatctctgggctccagtctgaggatgaggctgattattactgctgctcatatgcaggcagctacactgtggtattcggcgga

SEQ ID NO: 1075 - protein, 43 aa, Artificial Sequence
  Description of Artificial Sequence: Synthetic antibody
PDRFSGSKSGNSASLTISGLQSEDEADYYCCSYAGSYTVVFGG

SEQ ID NO: 1076 - DNA, 129 bp, Artificial Sequence
  Description of Artificial Sequence: Synthetic antibody
cctgatcgcttctctggctccaagtctggcaacacggcctccctgaccatctctgggctccagtctgaggatgagtctgattattactgctgctcatatgcaggcagctacactgtggtattcggcgga

SEQ ID NO: 1077 - protein, 43 aa, Artificial Sequence
  Description of Artificial Sequence: Synthetic antibody
PDRFSGSKSGNTASLTISGLQSEDESDYYCCSYAGSYTVVFGG

SEQ ID NO: 1078 - DNA, 129 bp, Artificial Sequence
  Description of Artificial Sequence: Synthetic antibody
cctgatcgcttctctggctccaagtctggcaacacggcctccctgaccatctctgggctccaggctgaggatgaggctgattattactgctgctcatatgcaggcagctacactgtggtattcggcgga

SEQ ID NO: 1079 - protein, 43 aa, Artificial Sequence
  Description of Artificial Sequence: Synthetic antibody
PDRFSGSKSGNTASLTISGLQAEDEADYYCCSYAGSYTVVFGG

SEQ ID NO: 1080 - DNA, 129 bp, Artificial Sequence
  Description of Artificial Sequence: Synthetic antibody
cctgatcgcttctctggctccaagtctggaaacacggcctccctgaccatctctgggctcctggctgaggatgaggctgattattactgctgctcatatgcaggcagctacactgtggtattcggcgga

SEQ ID NO: 1081 - protein, 43 aa, Artificial Sequence
  Description of Artificial Sequence: Synthetic antibody
PDRFSGSKSGNTASLTISGLLAEDEADYYCCSYAGSYTVVFGG

SEQ ID NO: 1082 - DNA, 129 bp, Artificial Sequence
  Description of Artificial Sequence: Synthetic antibody
cctgatcgcttccctggctccaagtctggcaacacggcctccctgaccacctctgggctccaggctgaggatgaggctgattattactgctgctcatatgcaggcagctacactgtggtattcggcgga

SEQ ID NO: 1083 - protein, 43 aa, Artificial Sequence
  Description of Artificial Sequence: Synthetic antibody
PDRFPGSKSGNTASLTTSGLQAEDEADYYCCSYAGSYTVVFGG

SEQ ID NO: 1084 - protein, 12 aa, Artificial Sequence
  Description of Artificial Sequence: Synthetic antibody
CSYAGSYTNWVF

SEQ ID NO: 1085 - DNA, 129 bp, Artificial Sequence
  Description of Artificial Sequence: Synthetic antibody
gatcgcttctctgtctccaagtctgtcaacacggcctccctgaccctctctgggctccaggctgaggatgaggctgattattactgctgctcatatgcaggcagctacaccaattgggtgttcggcgga

SEQ ID NO: 1086 - protein, 43 aa, Artificial Sequence
  Description of Artificial Sequence: Synthetic antibody
DRFSVSKSVNTASLTLSGLQAEDEADYYCCSYAGSYTNWVFGG

SEQ ID NO: 1087 - DNA, 129 bp, Artificial Sequence
  Description of Artificial Sequence: Synthetic antibody
gatcgcttctctggctcgaagtctggcaacactgcctccctgaccatctctgggctccaggctgaggatgaggctgattattactgctgctcatatgcaggcagctacaccaattgggtgttcggcgga

SEQ ID NO: 1088 - protein, 43 aa, Artificial Sequence
  Description of Artificial Sequence: Synthetic antibody
DRFSGSKSGNTASLTISGLQAEDEADYYCCSYAGSYTNWVFGG

SEQ ID NO: 1089 - DNA, 129 bp, Artificial Sequence
  Description of Artificial Sequence: Synthetic antibody
gatcgcttctctggctccaagtctggcaagacggcctccctgtccatctctgggctccaggctgaggatgaggctgattattactgctgctcatatgcaggcagctacaccaattgggtgttcggcgga

SEQ ID NO: 1090 - protein, 43 aa, Artificial Sequence
  Description of Artificial Sequence: Synthetic antibody
DRFSGSKSGKTASLSISGLQAEDEADYYCCSYAGSYTNWVFGG

SEQ ID NO: 1091 - DNA, 129 bp, Artificial Sequence
  Description of Artificial Sequence: Synthetic antibody
gatcgcttctctggctccaagtctggcaacactgcctccctgaccatctctgggctccaggctgaggatgaggctgattattactgctgctcatatgcaggcagctacaccaattgggtgttcggcggt

SEQ ID NO: 1092 - DNA, 129 bp, Artificial Sequence
  Description of Artificial Sequence: Synthetic antibody
gatcgcttctctggctccaagtctggcaacacggcctccctgaccatctctgggctccaggctgaggatgaggctgattattactgctgctcatatgcaggcagctacaccaattgggtgttcggcgga

SEQ ID NO: 1093 - DNA, 129 bp, Artificial Sequence
  Description of Artificial Sequence: Synthetic antibody
gatcgcttctcgggctccaagtctggcaacacggcctccctgaccatctctgggctccaggctgaggacgaggctgattattactgctgctcatatgcaggcagctacaccaattgggtgttcggcgga

SEQ ID NO: 1094 - DNA, 129 bp, Artificial Sequence
  Description of Artificial Sequence: Synthetic antibody
ttccgcttctctggctccaagtctggcaacacggcctccctgaccatctctgggctccaggctgaggatgaggctgattattactgctgctcatatgcaggcagctacaccaattgggtgttcggcgga

SEQ ID NO: 1095 - protein, 43 aa, Artificial Sequence
  Description of Artificial Sequence: Synthetic antibody
FRFSGSKSGNTASLTISGLQAEDEADYYCCSYAGSYTNWVFGG

SEQ ID NO: 1096 - DNA, 129 bp, Artificial Sequence
  Description of Artificial Sequence: Synthetic antibody
gttcgcttctctggctccaagtctggcaacacggcctccctgaccatctctgggctccaggctgaggatgaggctgattattactgctgctcatatgcaggcagctacaccaattgggtgttcggcgga

SEQ ID NO: 1097 - protein, 43 aa, Artificial Sequence
  Description of Artificial Sequence: Synthetic antibody
VRFSGSKSGNTASLTISGLQAEDEADYYCCSYAGSYTNWVFGG

SEQ ID NO: 1098 - DNA, 129 bp, Artificial Sequence
  Description of Artificial Sequence: Synthetic antibody
atccgcttctctggctccaagtctggcaacacggcctccctgaccatctctgggctccaggctgaggatgaggctgattattactgctgctcatatgcaggcagctacaccaattgggtgttcggcgga

SEQ ID NO: 1099 - protein, 43 aa, Artificial Sequence
  Description of Artificial Sequence: Synthetic antibody
IRFSGSKSGNTASLTISGLQAEDEADYYCCSYAGSYTNWVFGG

SEQ ID NO: 1100 - protein, 12 aa, Artificial Sequence
  Description of Artificial Sequence: Synthetic antibody
CSYAGSSTPYVF

SEQ ID NO: 1101 - DNA, 129 bp, Artificial Sequence
  Description of Artificial Sequence: Synthetic antibody
tttcgcttctctggctccaagtctggcaacacggcctccctgacaatctctgggctccaggctgaggacgaggctgattattactgctgctcatatgcaggtagtagcactccctacgtcttcggaact

SEQ ID NO: 1102 - protein, 43 aa, Artificial Sequence
  Description of Artificial Sequence: Synthetic antibody
FRFSGSKSGNTASLTISGLQAEDEADYYCCSYAGSSTPYVFGT

SEQ ID NO: 1103 - DNA, 129 bp, Artificial Sequence
  Description of Artificial Sequence: Synthetic antibody
aatcgcttctctggctccatgtctggcatcacggcctccctgacaatctctgggctccaggctgaggacgaggctgattattactgctgctcatatgcaggtagtagcactccttatgtcttcggaact

SEQ ID NO: 1104 - protein, 43 aa, Artificial Sequence
  Description of Artificial Sequence: Synthetic antibody
NRFSGSMSGITASLTISGLQAEDEADYYCCSYAGSSTPYVFGT

SEQ ID NO: 1105 - DNA, 129 bp, Artificial Sequence
  Description of Artificial Sequence: Synthetic antibody
aatcgcttctctggctccaagtctggcaacacggcctccctgacaatctctgggctcgaggctgaggacgaggctgattattactgctgctcatatgcaggtagtagcactccttatgtcttcggatct

SEQ ID NO: 1106 - protein, 43 aa, Artificial Sequence
  Description of Artificial Sequence: Synthetic antibody
NRFSGSKSGNTASLTISGLEAEDEADYYCCSYAGSSTPYVFGS

SEQ ID NO: 1107 - DNA, 129 bp, Artificial Sequence
  Description of Artificial Sequence: Synthetic antibody
aatcgcttctctggctccaagtctggcaacacggcctccctgacaatctctgggctccaggctgaggacgaggctgattattactgctgctcatatgcaggtagtagcactccttatgtcttcggaact

SEQ ID NO: 1108 - protein, 43 aa, Artificial Sequence
  Description of Artificial Sequence: Synthetic antibody
NRFSGSKSGNTASLTISGLQAEDEADYYCCSYAGSSTPYVFGT

SEQ ID NO: 1109 - DNA, 129 bp, Artificial Sequence
  Description of Artificial Sequence: Synthetic antibody
aatcgcttctctggctccaagtctggcaacacggcctccctgacaatctctgggctccaggctgaggacgaggctgattattactgctgctcatatgcaggtagtagcactccctacgtcttcggaact

SEQ ID NO: 1110 - DNA, 129 bp, Artificial Sequence
  Description of Artificial Sequence: Synthetic antibody
aatcgcttctctggctccaagtctggcaacacggcctccctgacaatctctgggctccaggctgaggacgaggctgattattactgctgctcatatgcaggtagtagcaccccctatgtcttcggaact

SEQ ID NO: 1111 - DNA, 129 bp, Artificial Sequence
  Description of Artificial Sequence: Synthetic antibody
aatcgattctctggctccaagtctggcaacacggcctccctgactatctctgggctccaggctgaggacgaggctgattattactgctgctcatatgcaggtagtagcactccctacgtcttcggaact

SEQ ID NO: 1112 - DNA, 129 bp, Artificial Sequence
  Description of Artificial Sequence: Synthetic antibody
atccgcttctctggctccaagtctggcaacacggcctccctgacaatctctgggctccaggctgaggacgaggctgattattactgctgctcatatgcaggtagtagcactccttatgtcttcggaact

SEQ ID NO: 1113 - protein, 43 aa, Artificial Sequence
  Description of Artificial Sequence: Synthetic antibody
IRFSGSKSGNTASLTISGLQAEDEADYYCCSYAGSSTPYVFGT

SEQ ID NO: 1114 - DNA, 129 bp, Artificial Sequence
  Description of Artificial Sequence: Synthetic antibody
atccgcttctctggctccaagtctggcaacacggcctccctgacaatctctgggctccaggctgaggacgaggctgattattactgctgctcatatgcaggtagtagcaccccctatgtcttcggaact

SEQ ID NO: 1115 - protein, 9 aa, Artificial Sequence
  Description of Artificial Sequence: Synthetic antibody
CSYAGSVVF

SEQ ID NO: 1116 - DNA, 129 bp, Artificial Sequence
  Description of Artificial Sequence: Synthetic antibody
ggggttctaattcgcttctctggctccaagtctggcaacacggcctccctgacaatctctgggctccaggctgaggacgaggctgattattactgctgctcatatgcaggtagtgtggtattcggcgga

SEQ ID NO: 1117 - protein, 43 aa, Artificial Sequence
  Description of Artificial Sequence: Synthetic antibody
GVLIRFSGSKSGNTASLTISGLQAEDEADYYCCSYAGSVVFGG

SEQ ID NO: 1118 - DNA, 129 bp, Artificial Sequence
  Description of Artificial Sequence: Synthetic antibody
ggggttctaatccgcttctctggctccaagtctggcaacacggcctccctgacaatctctgggctccaggctgaggacgaggctgattattactgctgctcatatgcaggtagtgtggtattcggcgga

SEQ ID NO: 1119 - DNA, 129 bp, Artificial Sequence
  Description of Artificial Sequence: Synthetic antibody
gggtttctaatccgcttctctggctccaagtctggcaacacggcctccctgacaatctctgggctccaggctgaggacgaggctgattattactgctgctcatatgcaggtagtgtggtattcggcgga

SEQ ID NO: 1120 - protein, 43 aa, Artificial Sequence
  Description of Artificial Sequence: Synthetic antibody
GFLIRFSGSKSGNTASLTISGLQAEDEADYYCCSYAGSVVFGG

SEQ ID NO: 1121 - DNA, 129 bp, Artificial Sequence
  Description of Artificial Sequence: Synthetic antibody
gtggtttctaatcgcttctctggctccaagtctggcaacacggcctccctgacaatctctgggctccaggctgatgacgaggctgattattactgctgctcatatgcaggtagtgtggtattcggcgga

SEQ ID NO: 1122 - protein, 43 aa, Artificial Sequence
  Description of Artificial Sequence: Synthetic antibody
VVSNRFSGSKSGNTASLTISGLQADDEADYYCCSYAGSVVFGG

SEQ ID NO: 1123 - DNA, 129 bp, Artificial Sequence
  Description of Artificial Sequence: Synthetic antibody
ggtgtttctaatcgcttctctggctccaagtctggcaacacggcctccctgacaatctcttggctccaggctgaggacgaggctgattattactgctgctcatatgcaggtagtgtggtattcggcgga

SEQ ID NO: 1124 - protein, 43 aa, Artificial Sequence
  Description of Artificial Sequence: Synthetic antibody
GVSNRFSGSKSGNTASLTISWLQAEDEADYYCCSYAGSVVFGG

SEQ ID NO: 1125 - DNA, 129 bp, Artificial Sequence
  Description of Artificial Sequence: Synthetic antibody
ggggtttctaatcgcttctcttgctcgaagtctggcaacacggcctccctgacaatctctgggctccaggctgaggacgaggctgattattactgctgctcatatgcaggtagtgtggtattcggcgga

SEQ ID NO: 1126 - protein, 43 aa, Artificial Sequence
  Description of Artificial Sequence: Synthetic antibody
GVSNRFSCSKSGNTASLTISGLQAEDEADYYCCSYAGSVVFGG

SEQ ID NO: 1127 - DNA, 129 bp, Artificial Sequence
  Description of Artificial Sequence: Synthetic antibody
ggggtttctaatcgcttctcttgctccaagtctggcaacacggcctccctgagaatctctgggctccaggctgaggacgaggctgattattactgctgctcatatgcaggtagtgtggtattcggcgga

SEQ ID NO: 1128 - protein, 43 aa, Artificial Sequence
  Description of Artificial Sequence: Synthetic antibody
GVSNRFSCSKSGNTASLRISGLQAEDEADYYCCSYAGSVVFGG

SEQ ID NO: 1129 - DNA, 129 bp, Artificial Sequence
  Description of Artificial Sequence: Synthetic antibody
ggggtttctaatcgcttctctggctccaagtctggcaacacggcctccctgacaatctctgggctccaggctgaggacgaggctgattattactgctgctcatatgcaggtagtgtggtattcggcgga

SEQ ID NO: 1130 - protein, 43 aa, Artificial Sequence
  Description of Artificial Sequence: Synthetic antibody
GVSNRFSGSKSGNTASLTISGLQAEDEADYYCCSYAGSVVFGG

SEQ ID NO: 1131 - DNA, 129 bp, Artificial Sequence
  Description of Artificial Sequence: Synthetic antibody
ggggttgctaatcgcttctctggctcgaagtctggcaacacggcctccctgacaatctctgggctccaggctgaggacgaggctgattattactgctgctcatatgcaggtagtgtggtattcggcgga

SEQ ID NO: 1132 - protein, 43 aa, Artificial Sequence
  Description of Artificial Sequence: Synthetic antibody
GVANRFSGSKSGNTASLTISGLQAEDEADYYCCSYAGSVVFGG

SEQ ID NO: 1133 - protein, 5 aa, Artificial Sequence
  Description of Artificial Sequence: Synthetic antibody
CSEVF

SEQ ID NO: 1134 - DNA, 129 bp, Artificial Sequence
  Description of Artificial Sequence: Synthetic antibody
atgcggccctctggggtttcttatcgcttctctggctccaagtctggcaacacggcctccctgacaatctctgggctccaggctgaggacgaggctgattattactgctgctcagaggtattcggcgga

SEQ ID NO: 1135 - protein, 43 aa, Artificial Sequence
  Description of Artificial Sequence: Synthetic antibody
MRPSGVSYRFSGSKSGNTASLTISGLQAEDEADYYCCSEVFGG

SEQ ID NO: 1136 - DNA, 129 bp, Artificial Sequence
  Description of Artificial Sequence: Synthetic antibody
aagcggccgtcaggggtttctaatggcttctctggctccaagtctggcaacacggcctccctgacaatctctgggctccaggctgaggacgaggctgattattactgctgctcagaggtattcggcgga

SEQ ID NO: 1137 - protein, 43 aa, Artificial Sequence
  Description of Artificial Sequence: Synthetic antibody
KRPSGVSNGFSGSKSGNTASLTISGLQAEDEADYYCCSEVFGG

SEQ ID NO: 1138 - DNA, 129 bp, Artificial Sequence
  Description of Artificial Sequence: Synthetic antibody
aagcggccctcagtggtttctaatcgcttctctggctccaagtctggcaagacggcctccctgacaatctctgggctccaggctgaggacgaggctgattattactgctgctcagaggtattcggcgga

SEQ ID NO: 1139 - protein, 43 aa, Artificial Sequence
  Description of Artificial Sequence: Synthetic antibody
KRPSVVSNRFSGSKSGKTASLTISGLQAEDEADYYCCSEVFGG

SEQ ID NO: 1140 - DNA, 129 bp, Artificial Sequence
  Description of Artificial Sequence: Synthetic antibody
aagcggccctcagtggtttctaatcgcttctctggctccaagtctggcaacacgtcctccctgacaatctctgggctccaggctgaggacgaggctgattattactgctgctcagaggtattcggcgga

SEQ ID NO: 1141 - protein, 43 aa, Artificial Sequence
  Description of Artificial Sequence: Synthetic antibody
KRPSVVSNRFSGSKSGNTSSLTISGLQAEDEADYYCCSEVFGG

SEQ ID NO: 1142 - DNA, 129 bp, Artificial Sequence
  Description of Artificial Sequence: Synthetic antibody
aagcggccctcagtggtttctaatcgcttctctggctccaagtctggcaacacggcctccctgacattctctgggctccaggctgaggacgaggctgattattactgctgctcagaggtattcggcgga

SEQ ID NO: 1143 - protein, 43 aa, Artificial Sequence
  Description of Artificial Sequence: Synthetic antibody
KRPSVVSNRFSGSKSGNTASLTFSGLQAEDEADYYCCSEVFGG

SEQ ID NO: 1144 - DNA, 129 bp, Artificial Sequence
  Description of Artificial Sequence: Synthetic antibody
aagcggccctcaggggtttcttatcgcttctctggctccaagtctggcaacacggcctccctgactatctctgggctccaggctgaggacgaggctgattattactgctgctcagaggtattcggcgga

SEQ ID NO: 1145 - protein, 43 aa, Artificial Sequence
  Description of Artificial Sequence: Synthetic antibody
KRPSGVSYRFSGSKSGNTASLTISGLQAEDEADYYCCSEVFGG

SEQ ID NO: 1146 - DNA, 129 bp, Artificial Sequence
  Description of Artificial Sequence: Synthetic antibody
aagcggccctcaggggtttctaatcgcttctctggctccaagtctggcaacacggcctccctgacaatctctgggctccaggctgaggacgaggctgattattactgctgctcagaggtattcggcgga

SEQ ID NO: 1147 - protein, 43 aa, Artificial Sequence
  Description of Artificial Sequence: Synthetic antibody
KRPSGVSNRFSGSKSGNTASLTISGLQAEDEADYYCCSEVFGG

SEQ ID NO: 1148 - DNA, 129 bp, Artificial Sequence
  Description of Artificial Sequence: Synthetic antibody
aagcggccctcaggggtttctaatcgcttctctggctccaagtctggcaacacggcctccctgacaatctctgggctacaggctgaggacgaggctggttattactgctgctcagaggtattcggcgga

SEQ ID NO: 1149 - protein, 43 aa, Artificial Sequence
  Description of Artificial Sequence: Synthetic antibody
KRPSGVSNRFSGSKSGNTASLTISGLQAEDEAGYYCCSEVFGG

SEQ ID NO: 1150 - DNA, 129 bp, Artificial Sequence
  Description of Artificial Sequence: Synthetic antibody
aagcggccctcaggggtttctaatcgcttctctggccccgagtctggcaacacggcctccctgacaatctctgggctccaggctgaggacgaggctgattattactgctgctcagaggtattcggcgga

SEQ ID NO: 1151 - protein, 43 aa, Artificial Sequence
  Description of Artificial Sequence: Synthetic antibody
KRPSGVSNRFSGPESGNTASLTISGLQAEDEADYYCCSEVFGG

SEQ ID NO: 1152 - protein, 10 aa, Artificial Sequence
  Description of Artificial Sequence: Synthetic antibody
CSYAGSSTVF

SEQ ID NO: 1153 - DNA, 129 bp, Artificial Sequence
  Description of Artificial Sequence: Synthetic antibody
gtttctaatcgcttctctggctccaagtctggcaacacggcctccctgacaatctctgggctccaggctgaggacggggctgattattactgctgctcatatgcaggtagtagcacggtattcggcgga

SEQ ID NO: 1154 - protein, 43 aa, Artificial Sequence
  Description of Artificial Sequence: Synthetic antibody
VSNRFSGSKSGNTASLTISGLQAEDGADYYCCSYAGSSTVFGG

SEQ ID NO: 1155 - DNA, 129 bp, Artificial Sequence
  Description of Artificial Sequence: Synthetic antibody
tttctaatccgcttctctggctccaagtctggcaacacggcctccctgacaatctctgggctccaggctgaggacgaggctgattattactgctgctcatatgcaggtagtagcacggtattcggcgga

SEQ ID NO: 1156 - protein, 43 aa, Artificial Sequence
  Description of Artificial Sequence: Synthetic antibody
FLIRFSGSKSGNTASLTISGLQAEDEADYYCCSYAGSSTVFGG

SEQ ID NO: 1157 - DNA, 129 bp, Artificial Sequence
  Description of Artificial Sequence: Synthetic antibody
gtttcttatcgcttctctggctccaagtctggcatcacggcctccctgacaatctctgggctccaggctgaggacgaggctgattattactgctgctcatatgcaggtagtagcacggtattcggcgga

SEQ ID NO: 1158 - protein, 43 aa, Artificial Sequence
  Description of Artificial Sequence: Synthetic antibody
VSYRFSGSKSGITASLTISGLQAEDEADYYCCSYAGSSTVFGG

SEQ ID NO: 1159 - DNA, 129 bp, Artificial Sequence
  Description of Artificial Sequence: Synthetic antibody
gtttctattcgcttctctggctccaagtctgccaacacggcctccctgacaatctctgggctccaggctgaggacgaggctgattattactgctgctcatatgcaggtagtagcacggtattcggcgga

SEQ ID NO: 1160 - protein, 43 aa, Artificial Sequence
  Description of Artificial Sequence: Synthetic antibody
VSIRFSGSKSANTASLTISGLQAEDEADYYCCSYAGSSTVFGG

SEQ ID NO: 1161 - DNA, 129 bp, Artificial Sequence
  Description of Artificial Sequence: Synthetic antibody
gtttctaatcgcttctctggctcgaagtctggctacacggcctccctgacaatctctgggctccaggctgaggacgaggctgattattactgctgctcatatgcaggtagtagcacggtattcggcgga

SEQ ID NO: 1162 - protein, 43 aa, Artificial Sequence
  Description of Artificial Sequence: Synthetic antibody
VSNRFSGSKSGYTASLTISGLQAEDEADYYCCSYAGSSTVFGG

SEQ ID NO: 1163 - DNA, 129 bp, Artificial Sequence
  Description of Artificial Sequence: Synthetic antibody
gtttctaatcgcttctctggctccaagtctggctacacggcctccctgacattctctgggctccaggctgaggacgaggctgattattactgctgctcatatgcaggtagtagcactgtattcggcgga

SEQ ID NO: 1164 - protein, 43 aa, Artificial Sequence
  Description of Artificial Sequence: Synthetic antibody
VSNRFSGSKSGYTASLTFSGLQAEDEADYYCCSYAGSSTVFGG

SEQ ID NO: 1165 - DNA, 129 bp, Artificial Sequence
  Description of Artificial Sequence: Synthetic antibody
gtttctaatcgcttctctggctccaagtctggcaacacggcctccctgacaatctctgggctccaggctgaggacgaggctgattattactgctgctcatatgcaggtagtagcactgtattcggcgga

SEQ ID NO: 1166 - protein, 43 aa, Artificial Sequence
  Description of Artificial Sequence: Synthetic antibody
VSNRFSGSKSGNTASLTISGLQAEDEADYYCCSYAGSSTVFGG

SEQ ID NO: 1167 - DNA, 129 bp, Artificial Sequence
  Description of Artificial Sequence: Synthetic antibody
gtttctaatcgcttctctggctccaagtctggcaacacggcctccctgacaatctctgggctccaggctgaggacgaggctgattattactgctgctcatatgcaggtagtagcacggtattcggcgga

SEQ ID NO: 1168 - DNA, 129 bp, Artificial Sequence
  Description of Artificial Sequence: Synthetic antibody
gtttctaatcgcttctctggctccaagtctggcaacacggcctccctgacaatctctgggctccaggctgaggacgaggctgatatttactgctgctcatatgcaggtagtagcacggtattcggcgga

SEQ ID NO: 1169 - protein, 43 aa, Artificial Sequence
  Description of Artificial Sequence: Synthetic antibody
VSNRFSGSKSGNTASLTISGLQAEDEADIYCCSYAGSSTVFGG

SEQ ID NO: 1170 - protein, 11 aa, Artificial Sequence
  Description of Artificial Sequence: Synthetic antibody
CSFAGGGTWGF

SEQ ID NO: 1171 - DNA, 129 bp, Artificial Sequence
  Description of Artificial Sequence: Synthetic antibody
tcttatcgcttctctggctccaagtctggcaacacggcctccctgacaatctctgtgctccaggctgaggacgaggctgattattattgctgctcatttgcaggtggtgggacttgggggttcggcgga

SEQ ID NO: 1172 - protein, 43 aa, Artificial Sequence
  Description of Artificial Sequence: Synthetic antibody
SYRFSGSKSGNTASLTISVLQAEDEADYYCCSFAGGGTWGFGG

SEQ ID NO: 1173 - DNA, 129 bp, Artificial Sequence
  Description of Artificial Sequence: Synthetic antibody
tctcatcgcttctctggctccaagtctggcaacacggcctccctgactatctctgggctccaggctgaggacgaggctgattattattgctgctcatttgcaggtggtgggacttgggggttcggcgga

SEQ ID NO: 1174 - protein, 43 aa, Artificial Sequence
  Description of Artificial Sequence: Synthetic antibody
SHRFSGSKSGNTASLTISGLQAEDEADYYCCSFAGGGTWGFGG

SEQ ID NO: 1175 - DNA, 129 bp, Artificial Sequence
  Description of Artificial Sequence: Synthetic antibody
tctactcgcttctctggctccaaggctggcaacacggcctccctgacaatctctgggctccaggctgaggacgaggctgattattattgctgctcatttgcaggtggtgggacttgggggttcggcgga

SEQ ID NO: 1176 - protein, 43 aa, Artificial Sequence
  Description of Artificial Sequence: Synthetic antibody
STRFSGSKAGNTASLTISGLQAEDEADYYCCSFAGGGTWGFGG

SEQ ID NO: 1177 - DNA, 129 bp, Artificial Sequence
  Description of Artificial Sequence: Synthetic antibody
tctaatcgcttctctggctccatgtctggcaactcggcctccctgacaatctctgggctccaggctgaggacgaggctgattattattgctgctcatttgcaggtggtgggacttgggggttcggcgga

SEQ ID NO: 1178 - protein, 43 aa, Artificial Sequence
  Description of Artificial Sequence: Synthetic antibody
SNRFSGSMSGNSASLTISGLQAEDEADYYCCSFAGGGTWGFGG

SEQ ID NO: 1179 - DNA, 129 bp, Artificial Sequence
  Description of Artificial Sequence: Synthetic antibody
tctaatcgcttctctggctccaagtctggcaacacggcctccctgacaatctctgggctccaggctgaggacgaggctgattattattgctgctcatttgcaggtggtgggacttgggggttcggcgga

SEQ ID NO: 1180 - protein, 43 aa, Artificial Sequence
  Description of Artificial Sequence: Synthetic antibody
SNRFSGSKSGNTASLTISGLQAEDEADYYCCSFAGGGTWGFGG

SEQ ID NO: 1181 - DNA, 129 bp, Artificial Sequence
  Description of Artificial Sequence: Synthetic antibody
tctaatcgcttctctggctccaagtctggcaacacggcctccctgacaatctctgggctccaggctgaggacgaggctgatatttattgctgctcatttgcaggtggtgggacttgggggttcggcgga

SEQ ID NO: 1182 - protein, 43 aa, Artificial Sequence
  Description of Artificial Sequence: Synthetic antibody
SNRFSGSKSGNTASLTISGLQAEDEADIYCCSFAGGGTWGFGG

SEQ ID NO: 1183 - DNA, 129 bp, Artificial Sequence
  Description of Artificial Sequence: Synthetic antibody
gctaatcgcttctctggcttcaagtctggcaacacggcctccctgacaatctctgggctccaggctgaggacgaggctgattattattgctgctcatttgcaggtggtgggacttgggggttcggcgga

SEQ ID NO: 1184 - protein, 43 aa, Artificial Sequence
  Description of Artificial Sequence: Synthetic antibody
ANRFSGFKSGNTASLTISGLQAEDEADYYCCSFAGGGTWGFGG

SEQ ID NO: 1185 - DNA, 129 bp, Artificial Sequence
  Description of Artificial Sequence: Synthetic antibody
ctaatccgcttctctggctccaagtctggcaacacggcctccctgacaatctctgggctccaggctgaggacgaggctgattattattgctgctcatttgcaggtggtgggacttgggggttcggcgga

SEQ ID NO: 1186 - protein, 43 aa, Artificial Sequence
  Description of Artificial Sequence: Synthetic antibody
LIRFSGSKSGNTASLTISGLQAEDEADYYCCSFAGGGTWGFGG

SEQ ID NO: 1187 - protein, 13 aa, Artificial Sequence
  Description of Artificial Sequence: Synthetic antibody
CSYAGSSTPNWVF

SEQ ID NO: 1188 - DNA, 129 bp, Artificial Sequence
  Description of Artificial Sequence: Synthetic antibody
cgcttgtctggctccatgtctggcaacacggcctccctgacaatctctgggctccaggctgaggacgaggctgattattactgctgctcatatgcaggtagtagcacgcctaattgggtgttcggcgga

SEQ ID NO: 1189 - protein, 43 aa, Artificial Sequence
  Description of Artificial Sequence: Synthetic antibody
RLSGSMSGNTASLTISGLQAEDEADYYCCSYAGSSTPNWVFGG

SEQ ID NO: 1190 - DNA, 129 bp, Artificial Sequence
  Description of Artificial Sequence: Synthetic antibody
cgcttctctggctccatgtctggctacacggcctccctgacaatctctgggctccaggctgaggacgaggctgattattactgctgctcatatgcaggtagtagcacgcctaattgggtgttcggcgga

SEQ ID NO: 1191 - protein, 43 aa, Artificial Sequence
  Description of Artificial Sequence: Synthetic antibody
RFSGSMSGYTASLTISGLQAEDEADYYCCSYAGSSTPNWVFGG

SEQ ID NO: 1192 - DNA, 129 bp, Artificial Sequence
  Description of Artificial Sequence: Synthetic antibody
cgcttctctggctccaagtctggcatctcggcctccctgacaatctctgggctccaggctgaggacgaggctgattattactgctgctcatatgcaggtagtagcacgcctaattgggtgttcggcgga

SEQ ID NO: 1193 - protein, 43 aa, Artificial Sequence
  Description of Artificial Sequence: Synthetic antibody
RFSGSKSGISASLTISGLQAEDEADYYCCSYAGSSTPNWVFGG

SEQ ID NO: 1194 - DNA, 129 bp, Artificial Sequence
  Description of Artificial Sequence: Synthetic antibody
cgcttctctggctccaagtctggcaacacggcctccctgacaatctctgggctccaggctgaggacgaggctgattattactgctgctcatatgcaggtagtagcacgcctaattgggtgttcggcgga

SEQ ID NO: 1195 - protein, 43 aa, Artificial Sequence
  Description of Artificial Sequence: Synthetic antibody
RFSGSKSGNTASLTISGLQAEDEADYYCCSYAGSSTPNWVFGG

SEQ ID NO: 1196 - DNA, 129 bp, Artificial Sequence
  Description of Artificial Sequence: Synthetic antibody
cgcttctctggctccaagtctggcaacacggcctccctgacaatctctcggctccaggctgatgacgaggctgattattactgctgctcatatgcaggtagtagcacgcctaattgggtgttcggcgga

SEQ ID NO: 1197 - protein, 43 aa, Artificial Sequence
  Description of Artificial Sequence: Synthetic antibody
RFSGSKSGNTASLTISRLQADDEADYYCCSYAGSSTPNWVFGG

SEQ ID NO: 1198 - DNA, 129 bp, Artificial Sequence
  Description of Artificial Sequence: Synthetic antibody
cgcttctctggctccaagtctggcaacacggcctccctgacaacctctgggctccaggctaaggacgaggctgattattactgctgctcatatgcaggtagtagcacgcctaattgggtgttcggcgga

SEQ ID NO: 1199 - protein, 43 aa, Artificial Sequence
  Description of Artificial Sequence: Synthetic antibody
RFSGSKSGNTASLTTSGLQAKDEADYYCCSYAGSSTPNWVFGG

SEQ ID NO: 1200 - DNA, 129 bp, Artificial Sequence
  Description of Artificial Sequence: Synthetic antibody
cgctgctctggctccaaggctggcaacacggcctccctgacaatctctgggctccaggctgaggacgaggctgattattactgctgctcatatgcaggtagtagcacgcctaattgggtgttcggcgga

SEQ ID NO: 1201 - protein, 43 aa, Artificial Sequence
  Description of Artificial Sequence: Synthetic antibody
RCSGSKAGNTASLTISGLQAEDEADYYCCSYAGSSTPNWVFGG

SEQ ID NO: 1202 - DNA, 129 bp, Artificial Sequence
  Description of Artificial Sequence: Synthetic antibody
cgcttctctggctccaagtctggcaacacggcctccctgacaatctctgggctccgggctgaggacgaggctgattattactgctgctcatatgcaggtagtagcacgcctaattgggtgttcggcgga

SEQ ID NO: 1203 - protein, 43 aa, Artificial Sequence
  Description of Artificial Sequence: Synthetic antibody
RFSGSKSGNTASLTISGLRAEDEADYYCCSYAGSSTPNWVFGG

SEQ ID NO: 1204 - protein, 12 aa, Artificial Sequence
  Description of Artificial Sequence: Synthetic antibody
CSYAGSGIFYVF

SEQ ID NO: 1205 - DNA, 129 bp, Artificial Sequence
  Description of Artificial Sequence: Synthetic antibody
attcgcttctctggctccaagtctggcatctcggcctccctgacaatctctgggctccaggctgaggacgaggctgattattactgctgctcatatgcaggtagtggaattttttatgtcttcggaact

SEQ ID NO: 1206 - protein, 43 aa, Artificial Sequence
  Description of Artificial Sequence: Synthetic antibody
IRFSGSKSGISASLTISGLQAEDEADYYCCSYAGSGIFYVFGT

SEQ ID NO: 1207 - DNA, 129 bp, Artificial Sequence
  Description of Artificial Sequence: Synthetic antibody
actcgcttctctggctccaagtctggcaacacggcctccctgactatctctgggctccaggctgaggacgaggctgattattactgctgctcatatgcaggtagtggaattttttatgtcttcggaact

SEQ ID NO: 1208 - protein, 43 aa, Artificial Sequence
  Description of Artificial Sequence: Synthetic antibody
TRFSGSKSGNTASLTISGLQAEDEADYYCCSYAGSGIFYVFGT

SEQ ID NO: 1209 - DNA, 129 bp, Artificial Sequence
  Description of Artificial Sequence: Synthetic antibody
aatcgcttctctggctccaagtctggcaacacggcctccctgacaatctctgggctccaggctgaggacgaggctgattattactgctgctcatatgcaggtagtggaattttttatgtcttcggaact

SEQ ID NO: 1210 - protein, 43 aa, Artificial Sequence
  Description of Artificial Sequence: Synthetic antibody
NRFSGSKSGNTASLTISGLQAEDEADYYCCSYAGSGIFYVFGT

SEQ ID NO: 1211 - DNA, 129 bp, Artificial Sequence
  Description of Artificial Sequence: Synthetic antibody
aatcgcttctctggctccaagtctggcaacacggcctccctgacaatctctgggctccaggctgaggacgaggctgattattactgctgctcatatgcaggtagtggaattttttacgtctttggaact

SEQ ID NO: 1212 - DNA, 129 bp, Artificial Sequence
  Description of Artificial Sequence: Synthetic antibody
aatcgcttctctggctccaagtctggcaacacggcctccctgacaatctctgggccccaggctgaggacgaggccgattattactgctgctcatatgcaggtagtggaattttttatgtcttcggaact

SEQ ID NO: 1213 - protein, 43 aa, Artificial Sequence
  Description of Artificial Sequence: Synthetic antibody
NRFSGSKSGNTASLTISGPQAEDEADYYCCSYAGSGIFYVFGT

SEQ ID NO: 1214 - DNA, 129 bp, Artificial Sequence
  Description of Artificial Sequence: Synthetic antibody
aatcgcttctctggctccaagtctagcaacacggcctccctgacaatccctgggctccaggctgaggacgaggctgattattactgctgctcatatgcaggtagtggaattttttatgtcttcggaact

SEQ ID NO: 1215 - protein, 43 aa, Artificial Sequence
  Description of Artificial Sequence: Synthetic antibody
NRFSGSKSSNTASLTIPGLQAEDEADYYCCSYAGSGIFYVFGT

SEQ ID NO: 1216 - DNA, 129 bp, Artificial Sequence
  Description of Artificial Sequence: Synthetic antibody
aatcgcttctctggctccaagtcaggcaacacggcctccctgactatctctgggctccaggctgaggacgaggctgattattactgctgctcatatgcaggtagtggaattttttatgtcttcggaact

SEQ ID NO: 1217 - DNA, 129 bp, Artificial Sequence
  Description of Artificial Sequence: Synthetic antibody
atccgcttctctggctccaagtctggcaacacggcctccctgacaatctctgggctccaggctgaggacgaggctgattattactgctgctcatatgcaggtagtggaattttttatgtcttcggaact

SEQ ID NO: 1218 - protein, 43 aa, Artificial Sequence
  Description of Artificial Sequence: Synthetic antibody
IRFSGSKSGNTASLTISGLQAEDEADYYCCSYAGSGIFYVFGT

SEQ ID NO: 1219 - protein, 11 aa, Artificial Sequence
  Description of Artificial Sequence: Synthetic antibody
CSYAGSHSYVF

SEQ ID NO: 1220 - DNA, 129 bp, Artificial Sequence
  Description of Artificial Sequence: Synthetic antibody
ccctatcgcttctctggctccaagtctggcgacacggcctccctgaccatctctgggctccagcctgacgatgaggctgactatcactgctgctcatatgcaggcagccatagttatgttttcggatct

SEQ ID NO: 1221 - protein, 43 aa, Artificial Sequence
  Description of Artificial Sequence: Synthetic antibody
PYRFSGSKSGDTASLTISGLQPDDEADYHCCSYAGSHSYVFGS

SEQ ID NO: 1222 - DNA, 129 bp, Artificial Sequence
  Description of Artificial Sequence: Synthetic antibody
ctaatccgcttctctggctccaagtctggcgacacggcctccctgaccatctctgggctccagcctgacgatgaggctgactatcactgctgctcatatgcaggcagccatagttatgttttcggatct

SEQ ID NO: 1223 - protein, 43 aa, Artificial Sequence
  Description of Artificial Sequence: Synthetic antibody
LIRFSGSKSGDTASLTISGLQPDDEADYHCCSYAGSHSYVFGS

SEQ ID NO: 1224 - DNA, 129 bp, Artificial Sequence
  Description of Artificial Sequence: Synthetic antibody
cgtaatcgcttctctggctccaagtctggcgacacggcctccctgaccatctctgggctccagcccgacgatgaggctgactatcactgctgctcatatgcaggcagccatagttatgttttcggatct

SEQ ID NO: 1225 - protein, 43 aa, Artificial Sequence
  Description of Artificial Sequence: Synthetic antibody
RNRFSGSKSGDTASLTISGLQPDDEADYHCCSYAGSHSYVFGS

SEQ ID NO: 1226 - DNA, 129 bp, Artificial Sequence
  Description of Artificial Sequence: Synthetic antibody
cctaatcgcttctctggctcgatgtctggcgacacggcctccctgaccatctctgggctccagcctgacgatgaggctgactatcactgctgctcatatgcaggcagccatagttatgttttcggatct

SEQ ID NO: 1227 - protein, 43 aa, Artificial Sequence
  Description of Artificial Sequence: Synthetic antibody
PNRFSGSMSGDTASLTISGLQPDDEADYHCCSYAGSHSYVFGS

SEQ ID NO: 1228 - DNA, 129 bp, Artificial Sequence
  Description of Artificial Sequence: Synthetic antibody
cctaatcgcttctctggctccatgtctggcgacacggcctccctgaccatctctgggctccagcctgacgatgaggctaactatcactgctgctcatatgcaggcagccatagttatgttttcggatct

SEQ ID NO: 1229 - protein, 43 aa, Artificial Sequence
  Description of Artificial Sequence: Synthetic antibody
PNRFSGSMSGDTASLTISGLQPDDEANYHCCSYAGSHSYVFGS

SEQ ID NO: 1230 - DNA, 129 bp, Artificial Sequence
  Description of Artificial Sequence: Synthetic antibody
cctaatcgcttctctggctccaagtctggcgtcacggcctccctgaccatctctgggctcctgcctgacgatgaggctgactatcactgctgctcatatgcaggcagccatagttatgttttcggatct

SEQ ID NO: 1231 - protein, 43 aa, Artificial Sequence
  Description of Artificial Sequence: Synthetic antibody
PNRFSGSKSGVTASLTISGLLPDDEADYHCCSYAGSHSYVFGS

SEQ ID NO: 1232 - DNA, 129 bp, Artificial Sequence
  Description of Artificial Sequence: Synthetic antibody
cctaatcgcttctctggctccaagtctggcgacacggcctccctgaccatctctgggctccagcctgacgatgaggctgactatcactgctgctcatatgcaggcagccatagttatgttttcggatct

SEQ ID NO: 1233 - protein, 43 aa, Artificial Sequence
  Description of Artificial Sequence: Synthetic antibody
PNRFSGSKSGDTASLTISGLQPDDEADYHCCSYAGSHSYVFGS

SEQ ID NO: 1234 - DNA, 129 bp, Artificial Sequence
  Description of Artificial Sequence: Synthetic antibody
cctaatcgcttctctggctccaagtctggcgacactgcctccctgaccatctctgggctccagcctgacgatgaggctgactatcactgctgctcatatgcaggcagccatagttatgttttcggatct

SEQ ID NO: 1235 - protein, 11 aa, Artificial Sequence
  Description of Artificial Sequence: Synthetic antibody
CSYTSSATWVF

SEQ ID NO: 1236 - DNA, 129 bp, Artificial Sequence
  Description of Artificial Sequence: Synthetic antibody
cctggtcgtctctctggttccaagtctggcaacacggcctccatgaccatctctggactccaggctgaggacgaggctgattattactgctgctcatatacaagcagtgccacttgggtgttcggcgga

SEQ ID NO: 1237 - protein, 43 aa, Artificial Sequence
  Description of Artificial Sequence: Synthetic antibody
PGRLSGSKSGNTASMTISGLQAEDEADYYCCSYTSSATWVFGG

SEQ ID NO: 1238 - DNA, 129 bp, Artificial Sequence
  Description of Artificial Sequence: Synthetic antibody
cctgatcgtctctctggtttcgagtctggcaatacggcctccatgaccatctctggactccaggctgaggacgaggctgattattactgctgctcatatacaagcagtgccacttgggtgttcggcgga

SEQ ID NO: 1239 - protein, 43 aa, Artificial Sequence
  Description of Artificial Sequence: Synthetic antibody
PDRLSGFESGNTASMTISGLQAEDEADYYCCSYTSSATWVFGG

SEQ ID NO: 1240 - DNA, 129 bp, Artificial Sequence
  Description of Artificial Sequence: Synthetic antibody
cctgatcgtctctctggttcgaagtctggcaatactgcctccatgaccatctctggactccaggctgaggacgaggctgattattactgctgctcatatacaagcagtgccacttgggtgttcggcgga

SEQ ID NO: 1241 - protein, 43 aa, Artificial Sequence
  Description of Artificial Sequence: Synthetic antibody
PDRLSGSKSGNTASMTISGLQAEDEADYYCCSYTSSATWVFGG

SEQ ID NO: 1242 - DNA, 129 bp, Artificial Sequence
  Description of Artificial Sequence: Synthetic antibody
cctgatcgtctctctggttccaagtctggcattacggcctccatgaccatctctggactccagtctgaggacgaggctgattattactgctgctcatatacaagcagtgccacttgggtgttcggcgga

SEQ ID NO: 1243 - protein, 43 aa, Artificial Sequence
  Description of Artificial Sequence: Synthetic antibody
PDRLSGSKSGITASMTISGLQSEDEADYYCCSYTSSATWVFGG

SEQ ID NO: 1244 - DNA, 129 bp, Artificial Sequence
  Description of Artificial Sequence: Synthetic antibody
cctgatcgtctctctggttccaagtctggcaatacggcctccatgaccatctctggactccaggctgaggacgaggctgattattactgctgctcatatacaagcagtgccacttgggtgttcggcgga

SEQ ID NO: 1245 - DNA, 129 bp, Artificial Sequence
  Description of Artificial Sequence: Synthetic antibody
cctgatcgtctctctggttccaagtctggcaatacggactccatgaccatctctggactccaggctgatgacgaggctgattattactgctgctcatatacaagcagtgccacttgggtgttcggcgga

SEQ ID NO: 1246 - protein, 43 aa, Artificial Sequence
  Description of Artificial Sequence: Synthetic antibody
PDRLSGSKSGNTDSMTISGLQADDEADYYCCSYTSSATWVFGG

SEQ ID NO: 1247 - DNA, 129 bp, Artificial Sequence
  Description of Artificial Sequence: Synthetic antibody
cctgatcgtctctctggttccaagtccggcaatacggcctccatgaccatctctggaccccaggctgaggacgaggctgattattactgctgctcatatacaagcagtgccacttgggtgttcggcgga

SEQ ID NO: 1248 - protein, 43 aa, Artificial Sequence
  Description of Artificial Sequence: Synthetic antibody
PDRLSGSKSGNTASMTISGPQAEDEADYYCCSYTSSATWVFGG

SEQ ID NO: 1249 - DNA, 129 bp, Artificial Sequence
  Description of Artificial Sequence: Synthetic antibody
cctgatcgtctctctggttccaagtctggcattacggcctccatgaccatctctggactccaggctgaggacgaggctgattattactgctgctcatatacaagcagtgccacttgggtgttcggcgga

SEQ ID NO: 1250 - protein, 43 aa, Artificial Sequence
  Description of Artificial Sequence: Synthetic antibody
PDRLSGSKSGITASMTISGLQAEDEADYYCCSYTSSATWVFGG

SEQ ID NO: 1251 - protein, 11 aa, Artificial Sequence
  Description of Artificial Sequence: Synthetic antibody
CSYAGGSTVVF

SEQ ID NO: 1252 - DNA, 129 bp, Artificial Sequence
  Description of Artificial Sequence: Synthetic antibody
tctattcgcttctctggctccaagtctggcaacacggcctccctgacaatctctgggctccaggctgaggtcgaggctgattattactgctgctcatatgcaggtggaagcactgtggtattcggcgga

SEQ ID NO: 1253 - protein, 43 aa, Artificial Sequence
  Description of Artificial Sequence: Synthetic antibody
SIRFSGSKSGNTASLTISGLQAEVEADYYCCSYAGGSTVVFGG

SEQ ID NO: 1254 - DNA, 129 bp, Artificial Sequence
  Description of Artificial Sequence: Synthetic antibody
tctaatcgcttctctggctccaagtctgggagctcggcctccctgacagtctctgggctccaggctgaggacgagggtgactattactgctgctcatatgcaggtggtagtactgtggtgttcggcgga

SEQ ID NO: 1255 - protein, 43 aa, Artificial Sequence
  Description of Artificial Sequence: Synthetic antibody
SNRFSGSKSGSSASLTVSGLQAEDEGDYYCCSYAGGSTVVFGG

SEQ ID NO: 1256 - DNA, 129 bp, Artificial Sequence
  Description of Artificial Sequence: Synthetic antibody
tctaatcgcttctctggctccaagtctggcagctcggcctcgctgacagtctctgggctccaggctgaggacgagggtgactattactgctgctcatatgcaggtggtagtactgtggtgttcggcgga

SEQ ID NO: 1257 - DNA, 129 bp, Artificial Sequence
  Description of Artificial Sequence: Synthetic antibody
tctaatcgcttctctggctccaagtctggcagcacggcctccctgacagtctctgtgctccaggctgaggacgagggtgactatttctgctgctcatatgcaggtggtagtactgtggtgttcggcgga

SEQ ID NO: 1258 - protein, 43 aa, Artificial Sequence
  Description of Artificial Sequence: Synthetic antibody
SNRFSGSKSGSTASLTVSVLQAEDEGDYFCCSYAGGSTVVFGG

SEQ ID NO: 1259 - DNA, 129 bp, Artificial Sequence
  Description of Artificial Sequence: Synthetic antibody
tctaatcgcttctctggctccaagtctggcagcacggcctccctgacagtctctgggctccaggctgaggacgagggtgactattactgctgctcatatgcaggtggtagtactgtggtgttcggcgga

SEQ ID NO: 1260 - protein, 43 aa, Artificial Sequence
  Description of Artificial Sequence: Synthetic antibody
SNRFSGSKSGSTASLTVSGLQAEDEGDYYCCSYAGGSTVVFGG

SEQ ID NO: 1261 - DNA, 129 bp, Artificial Sequence
  Description of Artificial Sequence: Synthetic antibody
tctaatcgcttctctggctccaagtctggcagcacggcctccctgacagcctcttggctccaggctgaggacgagggtgactattactgctgctcatatgcaggtggtagtactgtggtgttcggcgga

SEQ ID NO: 1262 - protein, 43 aa, Artificial Sequence
  Description of Artificial Sequence: Synthetic antibody
SNRFSGSKSGSTASLTASWLQAEDEGDYYCCSYAGGSTVVFGG

SEQ ID NO: 1263 - DNA, 129 bp, Artificial Sequence
  Description of Artificial Sequence: Synthetic antibody
tctaatcgcttctctggctccaagtctggcaacacggcctccctgacaatctctgggctccaggctgaggacgaggctgattattactgctgctcatatgcaggtggtagcactgtggtattcggcgaa

SEQ ID NO: 1264 - protein, 43 aa, Artificial Sequence
  Description of Artificial Sequence: Synthetic antibody
SNRFSGSKSGNTASLTISGLQAEDEADYYCCSYAGGSTVVFGE

SEQ ID NO: 1265 - DNA, 129 bp, Artificial Sequence
  Description of Artificial Sequence: Synthetic antibody
tctaatcgcttctctggctccaagtctggcaacacggcctccctgacaatctctgggctccaggctgaggacgaggctgattattactgctgctcatatgcaggtggaagcactgtggtattcggcgga

SEQ ID NO: 1266 - protein, 43 aa, Artificial Sequence
  Description of Artificial Sequence: Synthetic antibody
SNRFSGSKSGNTASLTISGLQAEDEADYYCCSYAGGSTVVFGG

SEQ ID NO: 1267 - protein, 11 aa, Artificial Sequence
  Description of Artificial Sequence: Synthetic antibody
CSYAGSSSVVF

SEQ ID NO: 1268 - DNA, 129 bp, Artificial Sequence
  Description of Artificial Sequence: Synthetic antibody
tctaatcgcttctcttgctccaagtctggcaacacggcctccctgactatctctgggctccaggctgaggacgaggctgattattactgctgctcatatgcaggtagtagctctgtggtattcggcgga

SEQ ID NO: 1269 - protein, 43 aa, Artificial Sequence
  Description of Artificial Sequence: Synthetic antibody
SNRFSCSKSGNTASLTISGLQAEDEADYYCCSYAGSSSVVFGG

SEQ ID NO: 1270 - DNA, 129 bp, Artificial Sequence
  Description of Artificial Sequence: Synthetic antibody
tctaatcgcttctctggctccaagtctggctacacgggctccctgacaatctctgggctccaggctgaggacgaggctgattattactgctgctcatatgcaggtagtagctctgtggtattcggcgga

SEQ ID NO: 1271 - protein, 43 aa, Artificial Sequence
  Description of Artificial Sequence: Synthetic antibody
SNRFSGSKSGYTGSLTISGLQAEDEADYYCCSYAGSSSVVFGG

SEQ ID NO: 1272 - DNA, 129 bp, Artificial Sequence
  Description of Artificial Sequence: Synthetic antibody
tctaatcgcttctctggctccaagtctggcaacacgtcctccctgacaatctctgggctccaggctgaggacgaggctgattattactgctgctcatatgcaggtagtagctctgttgtattcggcgga

SEQ ID NO: 1273 - protein, 43 aa, Artificial Sequence
  Description of Artificial Sequence: Synthetic antibody
SNRFSGSKSGNTSSLTISGLQAEDEADYYCCSYAGSSSVVFGG

SEQ ID NO: 1274 - DNA, 129 bp, Artificial Sequence
  Description of Artificial Sequence: Synthetic antibody
tctaatcgcttctctggctccaagtctggcaacacggcctccctgacaatctctgggctccaggctgaggacgaggctgattattactgctgctcatatgcaggtagtagctctgtggtattcggcgga

SEQ ID NO: 1275 - protein, 43 aa, Artificial Sequence
  Description of Artificial Sequence: Synthetic antibody
SNRFSGSKSGNTASLTISGLQAEDEADYYCCSYAGSSSVVFGG

SEQ ID NO: 1276 - DNA, 129 bp, Artificial Sequence
  Description of Artificial Sequence: Synthetic antibody
tctaatcgcttctctggctccaagtctggcaacacggcctccctgacaatctctgggctccaggctgaggacgaggctgattattactgctgctcatatgcaggtagtagcagtgtggtattcggcggt

SEQ ID NO: 1277 - DNA, 129 bp, Artificial Sequence
  Description of Artificial Sequence: Synthetic antibody
tctaatcgcttctctggctccaagcctggcaacacggcctccctgacaatctctgggctccaggctgaggacgaggctgattattactgctgctcatacgcaggtagtagctctgtggtattcggcgga

SEQ ID NO: 1278 - protein, 43 aa, Artificial Sequence
  Description of Artificial Sequence: Synthetic antibody
SNRFSGSKPGNTASLTISGLQAEDEADYYCCSYAGSSSVVFGG

SEQ ID NO: 1279 - DNA, 129 bp, Artificial Sequence
  Description of Artificial Sequence: Synthetic antibody
cttatccgcttctctggctccaagtctggcaacacggcctccctgacaatctctgggctccaggctgaggacgaggctgattattactgctgctcatatgcaggtagtagctctgtggtattcggcgga

SEQ ID NO: 1280 - protein, 43 aa, Artificial Sequence
  Description of Artificial Sequence: Synthetic antibody
LIRFSGSKSGNTASLTISGLQAEDEADYYCCSYAGSSSVVFGG

SEQ ID NO: 1281 - DNA, 129 bp, Artificial Sequence
  Description of Artificial Sequence: Synthetic antibody
ctaatccgcttctctggctccaagtctggcaacacggcctccctgacaatctctgggctccaggctgaggacgaggctgattattactgctgctcatatgcaggtagtagctctgtggtattcggcgga

SEQ ID NO: 1282 - protein, 10 aa, Artificial Sequence
  Description of Artificial Sequence: Synthetic antibody
CSYAGSRRVF

SEQ ID NO: 1283 - DNA, 129 bp, Artificial Sequence
  Description of Artificial Sequence: Synthetic antibody
tttctaatccgcttctctggctccaagtctggcaacacggcctccctgacaatctctgggctccaggctgaggacgaggctgattattactgctgctcatatgcaggtagtagaagggtcttcggaact

SEQ ID NO: 1284 - protein, 43 aa, Artificial Sequence
  Description of Artificial Sequence: Synthetic antibody
FLIRFSGSKSGNTASLTISGLQAEDEADYYCCSYAGSRRVFGT

SEQ ID NO: 1285 - DNA, 129 bp, Artificial Sequence
  Description of Artificial Sequence: Synthetic antibody
gtttctaatggcttctctggctcgaagtctggcaacacggcctccctgacaatctctgggctccaggctgaggacgaggctgattattactgctgctcatatgcaggtagtagaagggtcttcggaact

SEQ ID NO: 1286 - protein, 43 aa, Artificial Sequence
  Description of Artificial Sequence: Synthetic antibody
VSNGFSGSKSGNTASLTISGLQAEDEADYYCCSYAGSRRVFGT

SEQ ID NO: 1287 - DNA, 129 bp, Artificial Sequence
  Description of Artificial Sequence: Synthetic antibody
gtttctaatcgcttctctggctccaagtctggctactcggcctccctgacaatctctgggctccaggctgaggacgaggctgattattactgctgctcatatgcaggtagtagaagggtcttcggaact

SEQ ID NO: 1288 - protein, 43 aa, Artificial Sequence
  Description of Artificial Sequence: Synthetic antibody
VSNRFSGSKSGYSASLTISGLQAEDEADYYCCSYAGSRRVFGT

SEQ ID NO: 1289 - DNA, 129 bp, Artificial Sequence
  Description of Artificial Sequence: Synthetic antibody
gtttctaatcgcttctctggctccaagtctggcaactcggcctccctgtcaatctctgggctccaggctgaggacgaggctgattattactgctgctcatatgcaggtagtagaagggtcttcggaact

SEQ ID NO: 1290 - protein, 43 aa, Artificial Sequence
  Description of Artificial Sequence: Synthetic antibody
VSNRFSGSKSGNSASLSISGLQAEDEADYYCCSYAGSRRVFGT

SEQ ID NO: 1291 - DNA, 129 bp, Artificial Sequence
  Description of Artificial Sequence: Synthetic antibody
gtttctaatcgcttctctggctccaagtctggcaacactgcctacctgacaatctctgggctccaggctgaggacgaggctgattattactgctgctcatatgcaggtagtagaagggtcttcggaact

SEQ ID NO: 1292 - protein, 43 aa, Artificial Sequence
  Description of Artificial Sequence: Synthetic antibody
VSNRFSGSKSGNTAYLTISGLQAEDEADYYCCSYAGSRRVFGT

SEQ ID NO: 1293 - DNA, 129 bp, Artificial Sequence
  Description of Artificial Sequence: Synthetic antibody
gtttctaatcgcttctctggctccaagtctggcaacacggcctccctgacaatctctgggctccaggctgaggacgaggctgattattactgctgctcatatgcaggtagtagaagggtcttcggaact

SEQ ID NO: 1294 - protein, 43 aa, Artificial Sequence
  Description of Artificial Sequence: Synthetic antibody
VSNRFSGSKSGNTASLTISGLQAEDEADYYCCSYAGSRRVFGT

SEQ ID NO: 1295 - DNA, 129 bp, Artificial Sequence
  Description of Artificial Sequence: Synthetic antibody
gtttataatcgcttctctggctccaagtctgtcaacacggcctccctgacaatctctgggctccaggctgaggacgaggctgattattactgctgctcatatgcaggtagtagaagggtcttcggaact

SEQ ID NO: 1296 - protein, 43 aa, Artificial Sequence
  Description of Artificial Sequence: Synthetic antibody
VYNRFSGSKSVNTASLTISGLQAEDEADYYCCSYAGSRRVFGT

SEQ ID NO: 1297 - DNA, 129 bp, Artificial Sequence
  Description of Artificial Sequence: Synthetic antibody
gcttctaatagcttctctggctccaagtctggcaacacggcctccctgacaatctctgggctccaggctgaggacgaggctgattattactgctgctcatatgcaggtagtagaagggtcttcggaact

SEQ ID NO: 1298 - protein, 43 aa, Artificial Sequence
  Description of Artificial Sequence: Synthetic antibody
ASNSFSGSKSGNTASLTISGLQAEDEADYYCCSYAGSRRVFGT

SEQ ID NO: 1299 - DNA, 129 bp, Artificial Sequence
  Description of Artificial Sequence: Synthetic antibody
tctgatggcttctctggctccaagtctggcaactcggcctccctgacaatctctgggctccaggctgaggacgaggctgattattactgctgctcgtatgcaggtagttccactttggtgttcggcgga

SEQ ID NO: 1300 - protein, 43 aa, Artificial Sequence
  Description of Artificial Sequence: Synthetic antibody
SDGFSGSKSGNSASLTISGLQAEDEADYYCCSYAGSSTLVFGG

SEQ ID NO: 1301 - DNA, 129 bp, Artificial Sequence
  Description of Artificial Sequence: Synthetic antibody
tctgatcgcttctctggctccaagtctggcaacacggcctccctgacaatctctgggctccaggctgaggacgaggctgattattactgctgctcgtatgcaggtagttccactttggtgttcggcgga

SEQ ID NO: 1302 - protein, 43 aa, Artificial Sequence
  Description of Artificial Sequence: Synthetic antibody
SDRFSGSKSGNTASLTISGLQAEDEADYYCCSYAGSSTLVFGG

SEQ ID NO: 1303 - DNA, 129 bp, Artificial Sequence
  Description of Artificial Sequence: Synthetic antibody
tctaatcgcttctctggctccaagtctggctacacggcctcgctgacaatctctgggctccaggctgaggacgaggctgattattactgctgctcatatgcaggtagtagcactttggtgttcggcgga

SEQ ID NO: 1304 - protein, 43 aa, Artificial Sequence
  Description of Artificial Sequence: Synthetic antibody
SNRFSGSKSGYTASLTISGLQAEDEADYYCCSYAGSSTLVFGG

SEQ ID NO: 1305 - DNA, 129 bp, Artificial Sequence
  Description of Artificial Sequence: Synthetic antibody
tctaatcgcttctctggctccaagtctggcaacacggcctccctgactatctctgggctccagtctgaggacgaggctgattattactgctgctcatatgcaggtagtagcactttggtgttcggcgga

SEQ ID NO: 1306 - DNA, 129 bp, Artificial Sequence
  Description of Artificial Sequence: Synthetic antibody
tctaatcgcttctctggctccaagtctggcaacacggcctccctgacaatctctgggctccaggctgaggacgaggctgattattactgctgctcatatgcaggtagtagcactttggtgttcggcgga

SEQ ID NO: 1307 - DNA, 129 bp, Artificial Sequence
  Description of Artificial Sequence: Synthetic antibody
tctaatcgcttctctggctccaagtctggcaacacggcctccctgacaatctccgggctccaggctgaggacgaggctgattattactgctgctcatatgcaggtagcagcactttggtgttcggcgga

SEQ ID NO: 1308 - DNA, 129 bp, Artificial Sequence
  Description of Artificial Sequence: Synthetic antibody
ctgatccgcttctctggctccaagtctggcaacacggcctccctggcaatctctgggctccaggctgaggacgaggctgattattactgctgctcgtatgcaggtagttccactttggtgttcggcgga

SEQ ID NO: 1309 - protein, 43 aa, Artificial Sequence
  Description of Artificial Sequence: Synthetic antibody
LIRFSGSKSGNTASLAISGLQAEDEADYYCCSYAGSSTLVFGG

SEQ ID NO: 1310 - DNA, 129 bp, Artificial Sequence
  Description of Artificial Sequence: Synthetic antibody
ctaatccgcttctctggctccaagtctggcaacacggcctccctgacaatctctgggctccaggctgaggacgaggctgattattactgctgctcatatgcaggtagtagcactttggtgttcggcgga

SEQ ID NO: 1311 - protein, 11 aa, Artificial Sequence
  Description of Artificial Sequence: Synthetic antibody
CSYAGSSTLLF

SEQ ID NO: 1312 - DNA, 129 bp, Artificial Sequence
  Description of Artificial Sequence: Synthetic antibody
tctaatcgcttctctggctcccactctggcaacacggcctccctgacaatctctgggctccaggctgaggacgaggctgattatttctgctgctcatatgcaggtagtagcactttgctattcggcgga

SEQ ID NO: 1313 - protein, 43 aa, Artificial Sequence
  Description of Artificial Sequence: Synthetic antibody
SNRFSGSHSGNTASLTISGLQAEDEADYFCCSYAGSSTLLFGG

SEQ ID NO: 1314 - DNA, 129 bp, Artificial Sequence
  Description of Artificial Sequence: Synthetic antibody
tctaatcgcttctctggctccaagtctggcaagactgcctccctgacaatctctgggctccaggctgaggacgaggctgattatttctgctgctcatatgcaggtagtagcactttgctattcggcgga

SEQ ID NO: 1315 - protein, 43 aa, Artificial Sequence
  Description of Artificial Sequence: Synthetic antibody
SNRFSGSKSGKTASLTISGLQAEDEADYFCCSYAGSSTLLFGG

SEQ ID NO: 1316 - DNA, 129 bp, Artificial Sequence
  Description of Artificial Sequence: Synthetic antibody
tctaatcgcttctctggctccaagtctggcaacacggcctccctgacaatctctgggctccaggctgaggacgaggctgattatttctgctgctcatatgcaggtagtagcactttgctattcggcgga

SEQ ID NO: 1317 - protein, 43 aa, Artificial Sequence
  Description of Artificial Sequence: Synthetic antibody
SNRFSGSKSGNTASLTISGLQAEDEADYFCCSYAGSSTLLFGG

SEQ ID NO: 1318 - DNA, 129 bp, Artificial Sequence
  Description of Artificial Sequence: Synthetic antibody
tctaatcgcttctctggctccaagtctggcaacacggcctccctgacaatctctgggctccaggctgaggacgaggctgattatttctgctgctcatacgcaggtagtagcactttgctattcgccgga

SEQ ID NO: 1319 - protein, 43 aa, Artificial Sequence
  Description of Artificial Sequence: Synthetic antibody
SNRFSGSKSGNTASLTISGLQAEDEADYFCCSYAGSSTLLFAG

SEQ ID NO: 1320 - DNA, 129 bp, Artificial Sequence
  Description of Artificial Sequence: Synthetic antibody
tctaatcgcatctctggctcgaagtctggcaacacggcctccctgacaatctctgggctccaggctgaggacgaggctgattatttctgctgctcatatgcaggtagtagcactttgctattcggcgga

SEQ ID NO: 1321 - protein, 43 aa, Artificial Sequence
  Description of Artificial Sequence: Synthetic antibody
SNRISGSKSGNTASLTISGLQAEDEADYFCCSYAGSSTLLFGG

SEQ ID NO: 1322 - DNA, 129 bp, Artificial Sequence
  Description of Artificial Sequence: Synthetic antibody
ctaatccgcttctctggctccaagtctggcaacacggcctccctgacaatctctgggctccaggctgaggacgaggctgattatttctgctgctcatatgcaggtagtagcactttgctattcggcgga

SEQ ID NO: 1323 - protein, 43 aa, Artificial Sequence
  Description of Artificial Sequence: Synthetic antibody
LIRFSGSKSGNTASLTISGLQAEDEADYFCCSYAGSSTLLFGG

SEQ ID NO: 1324 - DNA, 129 bp, Artificial Sequence
  Description of Artificial Sequence: Synthetic antibody
ctaatacgcttctctggctccaagtctggcaacacggcctccctgacaatctctgggctccaggctgaggacgaggctgattatttctgctgctcatatgcaggtagtagcactttgctattcggcgga

SEQ ID NO: 1325 - DNA, 129 bp, Artificial Sequence
  Description of Artificial Sequence: Synthetic antibody
tctaatcgcttctctggctccaagtctggcaacacggcctccctgacaatctctgggctccaggctgaggacgaggctgattatttctgctgctcatatgcaggtagcagcactttgctattcggcgga

SEQ ID NO: 1326 - protein, 11 aa, Artificial Sequence
  Description of Artificial Sequence: Synthetic antibody
CSYAGTYSVVF

SEQ ID NO: 1327 - DNA, 129 bp, Artificial Sequence
  Description of Artificial Sequence: Synthetic antibody
cctggtcggttttctggctccaagtctggcaacacggcctccctgaccatctctggactccagcctgaggatgaacctgattattactgctgctcatatgcaggcacttacagtgttgtattcggcgga

SEQ ID NO: 1328 - protein, 43 aa, Artificial Sequence
  Description of Artificial Sequence: Synthetic antibody
PGRFSGSKSGNTASLTISGLQPEDEPDYYCCSYAGTYSVVFGG

SEQ ID NO: 1329 - DNA, 129 bp, Artificial Sequence
  Description of Artificial Sequence: Synthetic antibody
cctgatcggttttctggctccaagtctggcatcacggcctccctgaccatgtctggactccagcctgaggatgaatctgattattactgctgctcatatgcaggcacttacagtgttgtattcggcgga

SEQ ID NO: 1330 - protein, 43 aa, Artificial Sequence
  Description of Artificial Sequence: Synthetic antibody
PDRFSGSKSGITASLTMSGLQPEDESDYYCCSYAGTYSVVFGG

SEQ ID NO: 1331 - DNA, 129 bp, Artificial Sequence
  Description of Artificial Sequence: Synthetic antibody
cctgatcggttttctggctccaagtctggcaacacggcctccctgaccatctctggactccagcctgaggatgaatctgattattactgctgctcatatgcaggcacttacagtgttgtattcggcgga

SEQ ID NO: 1332 - protein, 43 aa, Artificial Sequence
  Description of Artificial Sequence: Synthetic antibody
PDRFSGSKSGNTASLTISGLQPEDESDYYCCSYAGTYSVVFGG

SEQ ID NO: 1333 - DNA, 129 bp, Artificial Sequence
  Description of Artificial Sequence: Synthetic antibody
cctgatcggttttctggctccaaggctcgcaacacggcctccctgaccatctctggactccagcctgaggatgaatctgattattactgctgctcatatgcaggcacttacagtgttgtattcggcgga

SEQ ID NO: 1334 - protein, 43 aa, Artificial Sequence
  Description of Artificial Sequence: Synthetic antibody
PDRFSGSKARNTASLTISGLQPEDESDYYCCSYAGTYSVVFGG

SEQ ID NO: 1335 - DNA, 129 bp, Artificial Sequence
  Description of Artificial Sequence: Synthetic antibody
cctgatcggttctctggctccaagtctggcaacacggcctccctgaccatctctggactccagcccgaggatgaatctgattattactgctgctcatatgcaggcacttacagtgttgtattcggcgga

SEQ ID NO: 1336 - DNA, 129 bp, Artificial Sequence
  Description of Artificial Sequence: Synthetic antibody
cctgatcggtgttctggctccaagtctggcaacacggcctcccagaccatctctggactccagcctgaggatgaatctgattattactgctgctcatatgcaggcacttacagtgttgtattcggcgga

SEQ ID NO: 1337 - protein, 43 aa, Artificial Sequence
  Description of Artificial Sequence: Synthetic antibody
PDRCSGSKSGNTASQTISGLQPEDESDYYCCSYAGTYSVVFGG

SEQ ID NO: 1338 - DNA, 129 bp, Artificial Sequence
  Description of Artificial Sequence: Synthetic antibody
cctgatcggctttctggctccaagtctggcaacgcggcctccctgaccatctctggactccagcctgaggatgaatctgattattactgctgctcatatgcaggcacttacagtgttgtattcggcgga

SEQ ID NO: 1339 - protein, 43 aa, Artificial Sequence
  Description of Artificial Sequence: Synthetic antibody
PDRLSGSKSGNAASLTISGLQPEDESDYYCCSYAGTYSVVFGG

SEQ ID NO: 1340 - protein, 12 aa, Artificial Sequence
  Description of Artificial Sequence: Synthetic antibody
CSYAGSYTFALF

SEQ ID NO: 1341 - DNA, 129 bp, Artificial Sequence
  Description of Artificial Sequence: Synthetic antibody
tttcgcttctctggctccaagtctggcaacacggcctccctgaccatctctgggctccaggctgaggatgaggctgattattactgctgctcatatgcaggcagctacactttcgcgctcttcggaact

SEQ ID NO: 1342 - protein, 43 aa, Artificial Sequence
  Description of Artificial Sequence: Synthetic antibody
FRFSGSKSGNTASLTISGLQAEDEADYYCCSYAGSYTFALFGT

SEQ ID NO: 1343 - DNA, 129 bp, Artificial Sequence
  Description of Artificial Sequence: Synthetic antibody
gttcgcctctctggctccaagtctggcaacacggcctccctgaccatctctgggctccaggctgaggatgaggctgattattactgctgctcatatgcaggcagctacactttcgcgctcttcggaact

SEQ ID NO: 1344 - protein, 43 aa, Artificial Sequence
  Description of Artificial Sequence: Synthetic antibody
VRLSGSKSGNTASLTISGLQAEDEADYYCCSYAGSYTFALFGT

SEQ ID NO: 1345 - DNA, 129 bp, Artificial Sequence
  Description of Artificial Sequence: Synthetic antibody
gatcgcttctctggctccatgtctggcaacacggcctccctgaccatctctgggctcctggctgaggatgaggctgattattactgctgctcatatgcaggcagctacactttcgcgctcttcggaact

SEQ ID NO: 1346 - protein, 43 aa, Artificial Sequence
  Description of Artificial Sequence: Synthetic antibody
DRFSGSMSGNTASLTISGLLAEDEADYYCCSYAGSYTFALFGT

SEQ ID NO: 1347 - DNA, 129 bp, Artificial Sequence
  Description of Artificial Sequence: Synthetic antibody
gatcgcttctctggctccaagtctggcaactcggcctccctgaccatctctgggctccaggctgatgatgaggctgattattactgctgctcatatgcaggcagctacactttcgcgctcttcggaact

SEQ ID NO: 1348 - protein, 43 aa, Artificial Sequence
  Description of Artificial Sequence: Synthetic antibody
DRFSGSKSGNSASLTISGLQADDEADYYCCSYAGSYTFALFGT

SEQ ID NO: 1349 - DNA, 129 bp, Artificial Sequence
  Description of Artificial Sequence: Synthetic antibody
gatcgcttctctggctccaagtctggcaacacggcctccctgaccatctctgggctccaggctgaggatgaggctgattattactgctgctcatatgcaggcagctacactttcgcgctcttcggaact

SEQ ID NO: 1350 - protein, 43 aa, Artificial Sequence
  Description of Artificial Sequence: Synthetic antibody
DRFSGSKSGNTASLTISGLQAEDEADYYCCSYAGSYTFALFGT

SEQ ID NO: 1351 - DNA, 129 bp, Artificial Sequence
  Description of Artificial Sequence: Synthetic antibody
atccgcttctctggctccaagtctggcaacacggcctccctgaccatctctgggctccaggctgaggatgaggctgattattactgctgctcatatgcaggcagctacactttcgcgctcttcggaact

SEQ ID NO: 1352 - protein, 43 aa, Artificial Sequence
  Description of Artificial Sequence: Synthetic antibody
IRFSGSKSGNTASLTISGLQAEDEADYYCCSYAGSYTFALFGT

SEQ ID NO: 1353 - DNA, 129 bp, Artificial Sequence
  Description of Artificial Sequence: Synthetic antibody
atacgcttctctggctccaagtctggcaacacggcctccctgaccatctctgggctccaggctgaggatgaggctgattattactgctgctcatatgcaggcagctacactttcgcgctcttcggaact

SEQ ID NO: 1354 - protein, 13 aa, Artificial Sequence
  Description of Artificial Sequence: Synthetic antibody
CSYAGSSTPYVVF

SEQ ID NO: 1355 - DNA, 129 bp, Artificial Sequence
  Description of Artificial Sequence: Synthetic antibody
tgcctctctggctccaagtctggcaacacggcctccctgacaatctctgggctccaggctgaggacgaggctgattattactgctgctcatatgcaggtagtagcactccctatgtggtattcggcgga

SEQ ID NO: 1356 - protein, 43 aa, Artificial Sequence
  Description of Artificial Sequence: Synthetic antibody
CLSGSKSGNTASLTISGLQAEDEADYYCCSYAGSSTPYVVFGG

SEQ ID NO: 1357 - DNA, 129 bp, Artificial Sequence
  Description of Artificial Sequence: Synthetic antibody
cgcttctctggctccatgtctggcaactcggcctccctgacaatctctgggctccaggctgaggacgaggctgattattactgctgctcatatgcaggtagtagcactccctatgtggtattcggcgga

SEQ ID NO: 1358 - protein, 43 aa, Artificial Sequence
  Description of Artificial Sequence: Synthetic antibody
RFSGSMSGNSASLTISGLQAEDEADYYCCSYAGSSTPYVVFGG

SEQ ID NO: 1359 - DNA, 129 bp, Artificial Sequence
  Description of Artificial Sequence: Synthetic antibody
cgcttctctggctccaagtctggctactcggcctccctgacaatctctgggctccaggctgaggacgaggctgattattactgctgctcatatgcaggtagtagcactccctatgtggtattcggcgga

SEQ ID NO: 1360 - protein, 43 aa, Artificial Sequence
  Description of Artificial Sequence: Synthetic antibody
RFSGSKSGYSASLTISGLQAEDEADYYCCSYAGSSTPYVVFGG

SEQ ID NO: 1361 - DNA, 129 bp, Artificial Sequence
  Description of Artificial Sequence: Synthetic antibody
cgcttctctggctccaagtctggcatcacggcctccctgacactctctgggctccaggctgaggacgaggctgattattactgctgctcatatgcaggtagtagcactccctatgtggtattcggcgga

SEQ ID NO: 1362 - protein, 43 aa, Artificial Sequence
  Description of Artificial Sequence: Synthetic antibody
RFSGSKSGITASLTLSGLQAEDEADYYCCSYAGSSTPYVVFGG

SEQ ID NO: 1363 - DNA, 129 bp, Artificial Sequence
  Description of Artificial Sequence: Synthetic antibody
cgcttctctggctccaagtctggcaacacggcctccctgacaatctctgggctccaggctgaggacgaggctgattattactgctgctcatatgcaggtagtagcactccctatgtggtattcggcgga

SEQ ID NO: 1364 - protein, 43 aa, Artificial Sequence
  Description of Artificial Sequence: Synthetic antibody
RFSGSKSGNTASLTISGLQAEDEADYYCCSYAGSSTPYVVFGG

SEQ ID NO: 1365 - DNA, 129 bp, Artificial Sequence
  Description of Artificial Sequence: Synthetic antibody
agcttctcttgctccaagtctggcaacacggcctccctgacaatctctgggctccaggctgaggacgaggctgattattactgctgctcatatgcaggtagtagcactccctatgtggtattcggcgga

SEQ ID NO: 1366 - protein, 43 aa, Artificial Sequence
  Description of Artificial Sequence: Synthetic antibody
SFSCSKSGNTASLTISGLQAEDEADYYCCSYAGSSTPYVVFGG

SEQ ID NO: 1367 - DNA, 129 bp, Artificial Sequence
  Description of Artificial Sequence: Synthetic antibody
agcttctctggctccaagtctggcaacacggcctccctgacaatctctgggctccaggctgaggacgaggctgattattactgctgctcatatgcgggtagtagcactccctatgtggtattcggcgga

SEQ ID NO: 1368 - protein, 43 aa, Artificial Sequence
  Description of Artificial Sequence: Synthetic antibody
SFSGSKSGNTASLTISGLQAEDEADYYCCSYAGSSTPYVVFGG

SEQ ID NO: 1369 - protein, 12 aa, Artificial Sequence
  Description of Artificial Sequence: Synthetic antibody
CSYAGSYTLGVF

SEQ ID NO: 1370 - DNA, 129 bp, Artificial Sequence
  Description of Artificial Sequence: Synthetic antibody
gatcgcttctctggctccaagtcttgcaacacggcctccctgtccatctctggcctccatgctgaggatgaggctaattattactgctgctcatatgcaggcagctacactttgggggtattcggcgga

SEQ ID NO: 1371 - protein, 43 aa, Artificial Sequence
  Description of Artificial Sequence: Synthetic antibody
DRFSGSKSCNTASLSISGLHAEDEANYYCCSYAGSYTLGVFGG

SEQ ID NO: 1372 - DNA, 129 bp, Artificial Sequence
  Description of Artificial Sequence: Synthetic antibody
gatcgcttctctggctccaagtctggctacacggcctccctgacgatctctggcctccaggctgaggatgaggctaattattactgctgctcatatgcaggcagctacactttgggggtattcggcgga

SEQ ID NO: 1373 - protein, 43 aa, Artificial Sequence
  Description of Artificial Sequence: Synthetic antibody
DRFSGSKSGYTASLTISGLQAEDEANYYCCSYAGSYTLGVFGG

SEQ ID NO: 1374 - DNA, 129 bp, Artificial Sequence
  Description of Artificial Sequence: Synthetic antibody
gatcgcttctctggctccaagtctggcaacacggcctccctgaccatctctggcctccaggctgaggatgaggctaattattactgctgctcatatgcaggcagctacactttgggggtattcggcgga

SEQ ID NO: 1375 - protein, 43 aa, Artificial Sequence
  Description of Artificial Sequence: Synthetic antibody
DRFSGSKSGNTASLTISGLQAEDEANYYCCSYAGSYTLGVFGG

SEQ ID NO: 1376 - DNA, 129 bp, Artificial Sequence
  Description of Artificial Sequence: Synthetic antibody
gatcgcttctctggctccaaggctggcaacacggcctccctgaccatctctggcctccaggctgaggatgaggctaattattactgctgctcatatgcaggcagctacactttgggggtattcggcggg

SEQ ID NO: 1377 - protein, 43 aa, Artificial Sequence
  Description of Artificial Sequence: Synthetic antibody
DRFSGSKAGNTASLTISGLQAEDEANYYCCSYAGSYTLGVFGG

SEQ ID NO: 1378 - DNA, 129 bp, Artificial Sequence
  Description of Artificial Sequence: Synthetic antibody
gttcgcttctctggctccaagtctggcaacacggcctccctgaccatctctggcctccaggctgaggatgaggctaattattactgctgctcatatgcaggcagctacactttgggggtattcggcgga

SEQ ID NO: 1379 - protein, 43 aa, Artificial Sequence
  Description of Artificial Sequence: Synthetic antibody
VRFSGSKSGNTASLTISGLQAEDEANYYCCSYAGSYTLGVFGG

SEQ ID NO: 1380 - DNA, 129 bp, Artificial Sequence
  Description of Artificial Sequence: Synthetic antibody
atccgcttctctggctccaagtctggcaacacggcctccctgaccatctctggcctccaggctgaggatgaggctaattattactgctgctcatatgcaggcagctacactttgggggtattcggcgga

SEQ ID NO: 1381 - protein, 43 aa, Artificial Sequence
  Description of Artificial Sequence: Synthetic antibody
IRFSGSKSGNTASLTISGLQAEDEANYYCCSYAGSYTLGVFGG

SEQ ID NO: 1382 - DNA, 129 bp, Artificial Sequence
  Description of Artificial Sequence: Synthetic antibody
atacgcttctctggctccaagtctggcaacacggcctccctgaccatctctggcctccaggctgaggatgaggctaattattactgctgctcatatgcaggcagctacactttgggggtattcggcgga

SEQ ID NO: 1383 - protein, 11 aa, Artificial Sequence
  Description of Artificial Sequence: Synthetic antibody
CSYAGSYRYVF

SEQ ID NO: 1384 - DNA, 129 bp, Artificial Sequence
  Description of Artificial Sequence: Synthetic antibody
ctgatccgcttctctggctccaagtctggcaacacggcctccctgaccatctctgggctccaggctgaggatgaggctgattattactgctgctcatatgcaggcagctaccgttatgtcttcggaact

SEQ ID NO: 1385 - protein, 43 aa, Artificial Sequence
  Description of Artificial Sequence: Synthetic antibody
LIRFSGSKSGNTASLTISGLQAEDEADYYCCSYAGSYRYVFGT

SEQ ID NO: 1386 - DNA, 129 bp, Artificial Sequence
  Description of Artificial Sequence: Synthetic antibody
ctgatacgcttctctggctccaagtctggcaacacggcctccctgaccatctctgggctccaggctgaggatgaggctgattattactgctgctcatatgcaggcagctaccgttatgtcttcggaact

SEQ ID NO: 1387 - DNA, 129 bp, Artificial Sequence
  Description of Artificial Sequence: Synthetic antibody
cctgatcgcttctctggctccaagtctgggaactcggcctccctgaccatctctgggctccaggctgaggatgaggctgattattactgctgctcatatgcaggcagctaccgttatgtcttcggaact

SEQ ID NO: 1388 - protein, 43 aa, Artificial Sequence
  Description of Artificial Sequence: Synthetic antibody
PDRFSGSKSGNSASLTISGLQAEDEADYYCCSYAGSYRYVFGT

SEQ ID NO: 1389 - DNA, 129 bp, Artificial Sequence
  Description of Artificial Sequence: Synthetic antibody
cctgatcgcttctctggctccaagtctggctacacggcctacctgaccatctctgggctccaggctgaggatgaggctgattattactgctgctcatatgcaggcagctaccgttatgtcttcggaact

SEQ ID NO: 1390 - protein, 43 aa, Artificial Sequence
  Description of Artificial Sequence: Synthetic antibody
PDRFSGSKSGYTAYLTISGLQAEDEADYYCCSYAGSYRYVFGT

SEQ ID NO: 1391 - DNA, 129 bp, Artificial Sequence
  Description of Artificial Sequence: Synthetic antibody
cctgatcgcttctctggctccaagtctggcaacacggcctccctgaccatctctgggctccaggctgaggatggggctgattattactgctgctcatatgcaggcagctaccgctatgtcttcggaact

SEQ ID NO: 1392 - protein, 43 aa, Artificial Sequence
  Description of Artificial Sequence: Synthetic antibody
PDRFSGSKSGNTASLTISGLQAEDGADYYCCSYAGSYRYVFGT

SEQ ID NO: 1393 - DNA, 129 bp, Artificial Sequence
  Description of Artificial Sequence: Synthetic antibody
cctgatcgcttctctggctccaagtctggcaacacggcctccctgaccatctctgggctccaggctgaggatgaggctgattattactgctgctcatatgcaggcagctaccgttatgtcttcggaact

SEQ ID NO: 1394 - protein, 43 aa, Artificial Sequence
  Description of Artificial Sequence: Synthetic antibody
PDRFSGSKSGNTASLTISGLQAEDEADYYCCSYAGSYRYVFGT

SEQ ID NO: 1395 - DNA, 129 bp, Artificial Sequence
  Description of Artificial Sequence: Synthetic antibody
cctgatcgattctctggctccaagtctggcaactcggcctccctgaccatctctgggctccaggctgaggatgaggctgattattactgctgctcatatgcaggcagctaccgttatgtcttcggaact

SEQ ID NO: 1396 - protein, 12 aa, Artificial Sequence
  Description of Artificial Sequence: Synthetic antibody
CSYAGSYTSFVF

SEQ ID NO: 1397 - DNA, 129 bp, Artificial Sequence
  Description of Artificial Sequence: Synthetic antibody
gatcgcttctctggctccaagtctggctacacggcctccctgaccatctctgtgctccaggctgaggatgaggctgattattactgctgctcatatgcaggcagctacacttcctttgtcttcggaact

SEQ ID NO: 1398 - protein, 43 aa, Artificial Sequence
  Description of Artificial Sequence: Synthetic antibody
DRFSGSKSGYTASLTISVLQAEDEADYYCCSYAGSYTSFVFGT

SEQ ID NO: 1399 - DNA, 129 bp, Artificial Sequence
  Description of Artificial Sequence: Synthetic antibody
gatcgcttctctggctccaagtctggcatctcggcctccctgaccatctctgggctccaggctgaggatgaggctgattattactgctgctcatatgcaggcagctacacttcctttgtcttcggaact

SEQ ID NO: 1400 - protein, 43 aa, Artificial Sequence
  Description of Artificial Sequence: Synthetic antibody
DRFSGSKSGISASLTISGLQAEDEADYYCCSYAGSYTSFVFGT

SEQ ID NO: 1401 - DNA, 129 bp, Artificial Sequence
  Description of Artificial Sequence: Synthetic antibody
gatcgcttctctggctccaagtctggcaacactgactccctgaccatctctgggctccaggctgaggatgaggctgattattactgctgctcatatgcaggcagctacacttcctttgtcttcggaact

SEQ ID NO: 1402 - protein, 43 aa, Artificial Sequence
  Description of Artificial Sequence: Synthetic antibody
DRFSGSKSGNTDSLTISGLQAEDEADYYCCSYAGSYTSFVFGT

SEQ ID NO: 1403 - DNA, 129 bp, Artificial Sequence
  Description of Artificial Sequence: Synthetic antibody
gatcgcttctctggctccaagtctggcaacacggcctccctgaccatctctgggctccaggctgaggatgaggctgcttattactgctgctcatatgcgggcagctacacttcctttgtcttcggaact

SEQ ID NO: 1404 - protein, 43 aa, Artificial Sequence
  Description of Artificial Sequence: Synthetic antibody
DRFSGSKSGNTASLTISGLQAEDEAAYYCCSYAGSYTSFVFGT

SEQ ID NO: 1405 - DNA, 129 bp, Artificial Sequence
  Description of Artificial Sequence: Synthetic antibody
gatcgcttctctggctccaagtctggcaacacggcctccctgaccatctctgggctccaggctgaggatgaggctgattattactgctgctcatatgcaggcagctacacttcctttgtcttcggaact

SEQ ID NO: 1406 - protein, 43 aa, Artificial Sequence
  Description of Artificial Sequence: Synthetic antibody
DRFSGSKSGNTASLTISGLQAEDEADYYCCSYAGSYTSFVFGT

SEQ ID NO: 1407 - DNA, 129 bp, Artificial Sequence
  Description of Artificial Sequence: Synthetic antibody
tttcgcttctctggctccaagtctggcaacacggcctccctgaccatctctgggctccaggctgaggatgaggctgattattactgctgctcatatgcaggcagctacacttcctttgtcttcggaact

SEQ ID NO: 1408 - protein, 43 aa, Artificial Sequence
  Description of Artificial Sequence: Synthetic antibody
FRFSGSKSGNTASLTISGLQAEDEADYYCCSYAGSYTSFVFGT

SEQ ID NO: 1409 - DNA, 129 bp, Artificial Sequence
  Description of Artificial Sequence: Synthetic antibody
atccgcttctctggctccaagtctggcaacacggcctccctgaccatctctgggctccaggctgaggatgaggctgattattactgctgctcatatgcaggcagctacacttcctttgtcttcggaact

SEQ ID NO: 1410 - protein, 43 aa, Artificial Sequence
  Description of Artificial Sequence: Synthetic antibody
IRFSGSKSGNTASLTISGLQAEDEADYYCCSYAGSYTSFVFGT

SEQ ID NO: 1411 - protein, 11 aa, Artificial Sequence
  Description of Artificial Sequence: Synthetic antibody
CSYAGSYPWVF

SEQ ID NO: 1412 - DNA, 129 bp, Artificial Sequence
  Description of Artificial Sequence: Synthetic antibody
cctgttcgcttctctggctgcaagtctggcaacacggcctccctgaccatctctgggctccaggctgaggatgaggctgattattactgctgctcatatgcaggcagctacccttgggtgttcggcgga

SEQ ID NO: 1413 - protein, 43 aa, Artificial Sequence
  Description of Artificial Sequence: Synthetic antibody
PVRFSGCKSGNTASLTISGLQAEDEADYYCCSYAGSYPWVFGG

SEQ ID NO: 1414 - DNA, 129 bp, Artificial Sequence
  Description of Artificial Sequence: Synthetic antibody
cctgttcgcttctctggctccaagtctggcaacacggcctccctgaccatctctgggctccagtctgaggatgaggctgattattactgctgctcatatgcaggcagctacccttgggtgttcggcgga

SEQ ID NO: 1415 - protein, 43 aa, Artificial Sequence
  Description of Artificial Sequence: Synthetic antibody
PVRFSGSKSGNTASLTISGLQSEDEADYYCCSYAGSYPWVFGG

SEQ ID NO: 1416 - DNA, 129 bp, Artificial Sequence
  Description of Artificial Sequence: Synthetic antibody
cctgatcgcttctctggctccaggtctggcaacacggcctccctgaccatctctgggctccaggctgaggatggggctgattattactgctgctcatacgcaggcagctacccttgggtgttcggcgga

SEQ ID NO: 1417 - protein, 43 aa, Artificial Sequence
  Description of Artificial Sequence: Synthetic antibody
PDRFSGSRSGNTASLTISGLQAEDGADYYCCSYAGSYPWVFGG

SEQ ID NO: 1418 - DNA, 129 bp, Artificial Sequence
  Description of Artificial Sequence: Synthetic antibody
cctgatcgcttctctggctccaagtctggcaactcggcctcgctgaccatctctgggctccaggctgaggatgaggctgattattactgctgctcatatgcaggcagctacccttgggtgttcggcgga

SEQ ID NO: 1419 - protein, 43 aa, Artificial Sequence
  Description of Artificial Sequence: Synthetic antibody
PDRFSGSKSGNSASLTISGLQAEDEADYYCCSYAGSYPWVFGG

SEQ ID NO: 1420 - DNA, 129 bp, Artificial Sequence
  Description of Artificial Sequence: Synthetic antibody
cctgatcgcttctctggctccaagtctggcaacacggcctccctgaccatctctgggctccaggctgaggatgaggctgattattactgctgctcatatgcaggcagctacccttgggtgttcggcgga

SEQ ID NO: 1421 - protein, 43 aa, Artificial Sequence
  Description of Artificial Sequence: Synthetic antibody
PDRFSGSKSGNTASLTISGLQAEDEADYYCCSYAGSYPWVFGG

SEQ ID NO: 1422 - DNA, 129 bp, Artificial Sequence
  Description of Artificial Sequence: Synthetic antibody
ccgtttcgcttctctggctccaagtctggcaacacggcctccctgaccatctctgggctccaggctgaggatgaggctgattattactgctgctcatatgcaggcagctacccttgggtgttcggcgga

SEQ ID NO: 1423 - protein, 43 aa, Artificial Sequence
  Description of Artificial Sequence: Synthetic antibody
PFRFSGSKSGNTASLTISGLQAEDEADYYCCSYAGSYPWVFGG

SEQ ID NO: 1424 - DNA, 129 bp, Artificial Sequence
  Description of Artificial Sequence: Synthetic antibody
cctgatcgcttctctggctccaagtctggctacacggcctccctgaccatctctgggctccaggctgaggatgaggctgattattactgctgctcatatgcaggcagctacccttgggtgttcggcgga

SEQ ID NO: 1425 - protein, 43 aa, Artificial Sequence
  Description of Artificial Sequence: Synthetic antibody
PDRFSGSKSGYTASLTISGLQAEDEADYYCCSYAGSYPWVFGG

SEQ ID NO: 1426 - protein, 11 aa, Artificial Sequence
  Description of Artificial Sequence: Synthetic antibody
CSYAGSYGVVF

SEQ ID NO: 1427 - DNA, 129 bp, Artificial Sequence
  Description of Artificial Sequence: Synthetic antibody
ctgttccgcttctctggctccaagtctggcaacacggcctccctgaccatctctgggctccaggctgaggatgaggctgattattactgctgctcatatgcaggcagctacggggtggtattcggcgga

SEQ ID NO: 1428 - protein, 43 aa, Artificial Sequence
  Description of Artificial Sequence: Synthetic antibody
LFRFSGSKSGNTASLTISGLQAEDEADYYCCSYAGSYGVVFGG

SEQ ID NO: 1429 - DNA, 129 bp, Artificial Sequence
  Description of Artificial Sequence: Synthetic antibody
ctgatccgcttctctggctccaagtctggcaacacggcctccctgaccatctctgggctccaggctgaggatgaggctgattattactgctgctcatatgcaggcagctacggggtggtattcggcgga

SEQ ID NO: 1430 - protein, 43 aa, Artificial Sequence
  Description of Artificial Sequence: Synthetic antibody
LIRFSGSKSGNTASLTISGLQAEDEADYYCCSYAGSYGVVFGG

SEQ ID NO: 1431 - DNA, 129 bp, Artificial Sequence
  Description of Artificial Sequence: Synthetic antibody
cctgatcgcttctctggctccaagtctggcaagacggcctccctgaccatctctgggctccaggctgaggatgaggctgattattactgctgctcatatgcgggcagctacggggtggtattcggcgga

SEQ ID NO: 1432 - protein, 43 aa, Artificial Sequence
  Description of Artificial Sequence: Synthetic antibody
PDRFSGSKSGKTASLTISGLQAEDEADYYCCSYAGSYGVVFGG

SEQ ID NO: 1433 - DNA, 129 bp, Artificial Sequence
  Description of Artificial Sequence: Synthetic antibody
cctgatcgcttctctggctccaagtctggcaacacggcctccctgaccatctctgggttccaggctgaggatgaggctgattattaccgctgctcatatgcaggcagctacggggtggtattcggcgga

SEQ ID NO: 1434 - protein, 43 aa, Artificial Sequence
  Description of Artificial Sequence: Synthetic antibody
PDRFSGSKSGNTASLTISGFQAEDEADYYRCSYAGSYGVVFGG

SEQ ID NO: 1435 - DNA, 129 bp, Artificial Sequence
  Description of Artificial Sequence: Synthetic antibody
cctgatcgcttctctggctccaagtctggcaacacggcctccctgaccatctctgggctccaggctgatgatgaggctgattattactgctgctcatatgcaggcagctacggggtggttttcggcgga

SEQ ID NO: 1436 - protein, 43 aa, Artificial Sequence
  Description of Artificial Sequence: Synthetic antibody
PDRFSGSKSGNTASLTISGLQADDEADYYCCSYAGSYGVVFGG

SEQ ID NO: 1437 - DNA, 129 bp, Artificial Sequence
  Description of Artificial Sequence: Synthetic antibody
cctgatcgcttctctggctccaagtctggcaacacggcctccctgaccatctctgggctccaggctgaggatgaggctgattattactgctgctcatatgcaggcagctacggggtggtattcggcgga

SEQ ID NO: 1438 - protein, 43 aa, Artificial Sequence
  Description of Artificial Sequence: Synthetic antibody
PDRFSGSKSGNTASLTISGLQAEDEADYYCCSYAGSYGVVFGG

SEQ ID NO: 1439 - DNA, 129 bp, Artificial Sequence
  Description of Artificial Sequence: Synthetic antibody
cctgatcgcttctctggctccaagtctggcaacactgcctccctgaccatctctgggctccaggctgaggatgaggctgattattactgctgctcatatgcaggcagctacggggtggtattcggcgga

SEQ ID NO: 1440 - protein, 9 aa, Artificial Sequence
  Description of Artificial Sequence: Synthetic antibody
CSYAGSRVF

SEQ ID NO: 1441 - DNA, 129 bp, Artificial Sequence
  Description of Artificial Sequence: Synthetic antibody
gggtttctaatccgcttctctggctccaagtctggcaacacggcctccctgacaatctctgggctccaggctgaggacgaggctgattattactgctgctcatatgcaggtagtagggtgttcggcgga

SEQ ID NO: 1442 - protein, 43 aa, Artificial Sequence
  Description of Artificial Sequence: Synthetic antibody
GFLIRFSGSKSGNTASLTISGLQAEDEADYYCCSYAGSRVFGG

SEQ ID NO: 1443 - DNA, 129 bp, Artificial Sequence
  Description of Artificial Sequence: Synthetic antibody
aggggtttctatcgcttctctggctccaagtctggcaacacggcctccctgacaatctctgggctccaggctgaggacgaggctgattattactgctgctcatatgcaggtagtagggtgttcggcgga

SEQ ID NO: 1444 - protein, 43 aa, Artificial Sequence
  Description of Artificial Sequence: Synthetic antibody
RGFYRFSGSKSGNTASLTISGLQAEDEADYYCCSYAGSRVFGG

SEQ ID NO: 1445 - DNA, 129 bp, Artificial Sequence
  Description of Artificial Sequence: Synthetic antibody
gtggtttctaatcgcttctctggctccaagtcttgcaacacggcctccctgacaatctctgggctccaggctgaggacgaggctgattattactgctgctcatatgcaggtagtagggtgttcggcgga

SEQ ID NO: 1446 - protein, 43 aa, Artificial Sequence
  Description of Artificial Sequence: Synthetic antibody
VVSNRFSGSKSCNTASLTISGLQAEDEADYYCCSYAGSRVFGG

SEQ ID NO: 1447 - DNA, 129 bp, Artificial Sequence
  Description of Artificial Sequence: Synthetic antibody
ggggtttctattcgcttctctggctccaagtctggcaacacggcctccctgactatctctgggctccaggctgaggacgaggctgattattactgctgctcatatgcaggtagtagggtgttcggcgga

SEQ ID NO: 1448 - protein, 43 aa, Artificial Sequence
  Description of Artificial Sequence: Synthetic antibody
GVSIRFSGSKSGNTASLTISGLQAEDEADYYCCSYAGSRVFGG

SEQ ID NO: 1449 - DNA, 129 bp, Artificial Sequence
  Description of Artificial Sequence: Synthetic antibody
ggggtttctaatcgcttctctggctccaagtctggcaacacggcctccctgacaatctctgggctccaggctgaggacgaggctgattattactgctgctcatatgcaggtagtagggtgttcggcgga

SEQ ID NO: 1450 - protein, 43 aa, Artificial Sequence
  Description of Artificial Sequence: Synthetic antibody
GVSNRFSGSKSGNTASLTISGLQAEDEADYYCCSYAGSRVFGG

SEQ ID NO: 1451 - protein, 12 aa, Artificial Sequence
  Description of Artificial Sequence: Synthetic antibody
CSYAGSSTLYVF

SEQ ID NO: 1452 - DNA, 129 bp, Artificial Sequence
  Description of Artificial Sequence: Synthetic antibody
aatcgcttctctggctccaagtctggcatcacggcctcgctgacaatctctgggctccaggctgaggacgaggctgattattactgctgctcatatgcaggtagtagcactctttatgtcttcggaact

SEQ ID NO: 1453 - protein, 43 aa, Artificial Sequence
  Description of Artificial Sequence: Synthetic antibody
NRFSGSKSGITASLTISGLQAEDEADYYCCSYAGSSTLYVFGT

SEQ ID NO: 1454 - DNA, 129 bp, Artificial Sequence
  Description of Artificial Sequence: Synthetic antibody
aatcgcttctctggctccaagtctggcaacacggcctccctgacaatctctgggctccaggctgaggacgaggctgattattactgctgctcatatgcaggtagtagcactctttatgtcttcggaact

SEQ ID NO: 1455 - protein, 43 aa, Artificial Sequence
  Description of Artificial Sequence: Synthetic antibody
NRFSGSKSGNTASLTISGLQAEDEADYYCCSYAGSSTLYVFGT

SEQ ID NO: 1456 - DNA, 129 bp, Artificial Sequence
  Description of Artificial Sequence: Synthetic antibody
aatcgcttctctggctccaagtctggcaacacggcctccctgacaatctctgggctccaggctgaggacgaggctgattattactgctgctcatacgcaggtagtagcactttgtatgtcttcggaact

SEQ ID NO: 1457 - DNA, 129 bp, Artificial Sequence
  Description of Artificial Sequence: Synthetic antibody
aatcgcttctccggctccaagtctggcaacacggcctccctgacaatctctgggctccaggctgaggacgaggctgattattactgctgctcatatgcaggtagtagcactctttatgtcttcggaact

SEQ ID NO: 1458 - DNA, 129 bp, Artificial Sequence
  Description of Artificial Sequence: Synthetic antibody
aatcgcctctctggctccaagtctggcaacacggcctccctgacaatctctgggctccaggctgaggacgaggctgattattactgctgctcatatgcaggtagtagcaccctttatgtcttcggaact

SEQ ID NO: 1459 - protein, 43 aa, Artificial Sequence
  Description of Artificial Sequence: Synthetic antibody
NRLSGSKSGNTASLTISGLQAEDEADYYCCSYAGSSTLYVFGT

SEQ ID NO: 1460 - DNA, 129 bp, Artificial Sequence
  Description of Artificial Sequence: Synthetic antibody
atccgcttctctggctccaagtctggcaacacggcctccctgacaatctctgggctccaggctgaggacgaggctgattattactgctgctcatatgcaggtagtagcactctttatgtcttcggaact

SEQ ID NO: 1461 - protein, 43 aa, Artificial Sequence
  Description of Artificial Sequence: Synthetic antibody
IRFSGSKSGNTASLTISGLQAEDEADYYCCSYAGSSTLYVFGT

SEQ ID NO: 1462 - protein, 10 aa, Artificial Sequence
  Description of Artificial Sequence: Synthetic antibody
CSYGGTYTVF

SEQ ID NO: 1463 - DNA, 129 bp, Artificial Sequence
  Description of Artificial Sequence: Synthetic antibody
tccctgatccgcttctctggctccaagtctggcaacacggcctccctgaccatctctgggctccaggctgaggatgaggctgattattactgctgctcatatggaggcacctacacagtgttcggcgaa

SEQ ID NO: 1464 - protein, 43 aa, Artificial Sequence
  Description of Artificial Sequence: Synthetic antibody
SLIRFSGSKSGNTASLTISGLQAEDEADYYCCSYGGTYTVFGE

SEQ ID NO: 1465 - DNA, 129 bp, Artificial Sequence
  Description of Artificial Sequence: Synthetic antibody
gtccctgatcgcttctctgtctccaagtctggctacacggcctccctgaccatctctgggctccaggctgaggatgaggctgattattactgctgctcatatggaggcacctacacagtgttcggcgaa

SEQ ID NO: 1466 - protein, 43 aa, Artificial Sequence
  Description of Artificial Sequence: Synthetic antibody
VPDRFSVSKSGYTASLTISGLQAEDEADYYCCSYGGTYTVFGE

SEQ ID NO: 1467 - DNA, 129 bp, Artificial Sequence
  Description of Artificial Sequence: Synthetic antibody
gtccctgatcgcttctctggctcgaagtctggcaacacggcctccctgacgatctctgggctccaggctgaggatgaggctgattattactgctgctcatatggaggcacctacacagtgttcggcgaa

SEQ ID NO: 1468 - protein, 43 aa, Artificial Sequence
  Description of Artificial Sequence: Synthetic antibody
VPDRFSGSKSGNTASLTISGLQAEDEADYYCCSYGGTYTVFGE

SEQ ID NO: 1469 - DNA, 129 bp, Artificial Sequence
  Description of Artificial Sequence: Synthetic antibody
gtccctgatcgcttctctggctccaagtcttgcaacacggcctccctgaccatctctgtgctccaggctgaggatgaggctgattattactgctgctcatatggaggcacctacacagtgttcggcgaa

SEQ ID NO: 1470 - protein, 43 aa, Artificial Sequence
  Description of Artificial Sequence: Synthetic antibody
VPDRFSGSKSCNTASLTISVLQAEDEADYYCCSYGGTYTVFGE

SEQ ID NO: 1471 - DNA, 129 bp, Artificial Sequence
  Description of Artificial Sequence: Synthetic antibody
gtccctgatcgcttctctggctccaagtctggcaacacggcctccctgaccatctctgggctccaggctgaggatgaggctgattattactgctgctcatatggaggcacctacacagtgttcggcgaa

SEQ ID NO: 1472 - DNA, 129 bp, Artificial Sequence
  Description of Artificial Sequence: Synthetic antibody
gtccctgatcgcttctccggctccaagtctggcaacacggccttcctgaccatctctgggctccaggctgaggatgaggctgattattactgctgctcatatggaggcacctacacagtgttcggcgaa

SEQ ID NO: 1473 - protein, 43 aa, Artificial Sequence
  Description of Artificial Sequence: Synthetic antibody
VPDRFSGSKSGNTAFLTISGLQAEDEADYYCCSYGGTYTVFGE

SEQ ID NO: 1474 - protein, 13 aa, Artificial Sequence
  Description of Artificial Sequence: Synthetic antibody
CSYAGSSTFNWVF

SEQ ID NO: 1475 - DNA, 129 bp, Artificial Sequence
  Description of Artificial Sequence: Synthetic antibody
cgcttctctgtctccaagtctgtcaacacggcctccctgacaatctctgggctccaggctgaggacgaggctgattattactgctgctcatatgcaggtagtagcactttcaattgggtgttcggcgga

SEQ ID NO: 1476 - protein, 43 aa, Artificial Sequence
  Description of Artificial Sequence: Synthetic antibody
RFSVSKSVNTASLTISGLQAEDEADYYCCSYAGSSTFNWVFGG

SEQ ID NO: 1477 - DNA, 129 bp, Artificial Sequence
  Description of Artificial Sequence: Synthetic antibody
cgcttctctggctccatgtctggcaactcggcctccctgactatctctgggctccaggctgaggacgaggctgattattactgctgctcatatgcaggtagtagcactttcaattgggtgttcggcgga

SEQ ID NO: 1478 - protein, 43 aa, Artificial Sequence
  Description of Artificial Sequence: Synthetic antibody
RFSGSMSGNSASLTISGLQAEDEADYYCCSYAGSSTFNWVFGG

SEQ ID NO: 1479 - DNA, 129 bp, Artificial Sequence
  Description of Artificial Sequence: Synthetic antibody
cgcttctctggctccaagtctggcaactcggcctccctgactatctctgggctccaggctgaggacgaggctgattattactgctgctcatatgcaggtagtagcactttcaattgggtgttcggcgga

SEQ ID NO: 1480 - protein, 43 aa, Artificial Sequence
  Description of Artificial Sequence: Synthetic antibody
RFSGSKSGNSASLTISGLQAEDEADYYCCSYAGSSTFNWVFGG

SEQ ID NO: 1481 - DNA, 129 bp, Artificial Sequence
  Description of Artificial Sequence: Synthetic antibody
cgcttctctggctccaagtctggcaacacggcctccctgacattctctgggctgcaggctgaggacgaggctgattattactgctgctcatatgcaggtagtagcactttcaattgggtgttcggcgga

SEQ ID NO: 1482 - protein, 43 aa, Artificial Sequence
  Description of Artificial Sequence: Synthetic antibody
RFSGSKSGNTASLTFSGLQAEDEADYYCCSYAGSSTFNWVFGG

SEQ ID NO: 1483 - DNA, 129 bp, Artificial Sequence
  Description of Artificial Sequence: Synthetic antibody
cgcttctctggctccaagtctggcaacacggcctccctgacaatctctgggctccaggctgatgacgagtctgattattactgctgctcatatgcaggtagtagcactttcaattgggtgttcggcgga

SEQ ID NO: 1484 - protein, 43 aa, Artificial Sequence
  Description of Artificial Sequence: Synthetic antibody
RFSGSKSGNTASLTISGLQADDESDYYCCSYAGSSTFNWVFGG

SEQ ID NO: 1485 - DNA, 129 bp, Artificial Sequence
  Description of Artificial Sequence: Synthetic antibody
cgcttctctggctccaagtctggcaacacggcctccctgacaatctctgggctccaggctgaggacgaggctgattattactgctgctcatatgcaggtagtagcactttcaattgggtgttcggcgga

SEQ ID NO: 1486 - protein, 43 aa, Artificial Sequence
  Description of Artificial Sequence: Synthetic antibody
RFSGSKSGNTASLTISGLQAEDEADYYCCSYAGSSTFNWVFGG

SEQ ID NO: 1487 - protein, 9 aa, Artificial Sequence
  Description of Artificial Sequence: Synthetic antibody
CSYAGRYVF

SEQ ID NO: 1488 - DNA, 129 bp, Artificial Sequence
  Description of Artificial Sequence: Synthetic antibody
ggggtccctgatcgcttctctggctccaagtctggcaacacggcctccctgtccatctctgggctccaggctgaggatgaggctgattattactgctgctcatatgcaggcagatatgtcttcggatct

SEQ ID NO: 1489 - protein, 43 aa, Artificial Sequence
  Description of Artificial Sequence: Synthetic antibody
GVPDRFSGSKSGNTASLSISGLQAEDEADYYCCSYAGRYVFGS

SEQ ID NO: 1490 - DNA, 129 bp, Artificial Sequence
  Description of Artificial Sequence: Synthetic antibody
gggtccctgatccgcttctctggctccaagtctggcaacacggcctccctgaccatctctgggctccaggctgaggatgaggctgattattactgctgctcatatgcaggcagatatgtcttcggaact

SEQ ID NO: 1491 - protein, 43 aa, Artificial Sequence
  Description of Artificial Sequence: Synthetic antibody
GSLIRFSGSKSGNTASLTISGLQAEDEADYYCCSYAGRYVFGT

SEQ ID NO: 1492 - DNA, 129 bp, Artificial Sequence
  Description of Artificial Sequence: Synthetic antibody
ggtgtccctgatcgcttctctggctccaagtctggcatcacggcctccctgaccatctctgggctccaggctgaggatgaggctgattattactgctgctcatatgcaggcagatatgtcttcggaact

SEQ ID NO: 1493 - protein, 43 aa, Artificial Sequence
  Description of Artificial Sequence: Synthetic antibody
GVPDRFSGSKSGITASLTISGLQAEDEADYYCCSYAGRYVFGT

SEQ ID NO: 1494 - DNA, 129 bp, Artificial Sequence
  Description of Artificial Sequence: Synthetic antibody
ggggtccctgatcgcttctctgtctccaagtctggcatcacggcctccctgaccatctctgggctccaggctgaggatgaggctgattattactgctgctcatatgcaggcagatatgtcttcggaact

SEQ ID NO: 1495 - protein, 43 aa, Artificial Sequence
  Description of Artificial Sequence: Synthetic antibody
GVPDRFSVSKSGITASLTISGLQAEDEADYYCCSYAGRYVFGT

SEQ ID NO: 1496 - DNA, 129 bp, Artificial Sequence
  Description of Artificial Sequence: Synthetic antibody
ggggtccctgatcgcttctctggctccaagtctggcaacacggcctccctgaccatctctgggctccaggctgaggatgaggctgattattactgctgctcatatgcaggcagatatgtcttcggaact

SEQ ID NO: 1497 - protein, 43 aa, Artificial Sequence
  Description of Artificial Sequence: Synthetic antibody
GVPDRFSGSKSGNTASLTISGLQAEDEADYYCCSYAGRYVFGT

SEQ ID NO: 1498 - DNA, 129 bp, Artificial Sequence
  Description of Artificial Sequence: Synthetic antibody
gttcgcttctctggctccaagtctggcaacacggcctccctgaccatctctgggctcctggctgaggatgaggctgattattactgctgctcatatgcaggcagctacactttgggggtcttcggaact

SEQ ID NO: 1499 - protein, 43 aa, Artificial Sequence
  Description of Artificial Sequence: Synthetic antibody
VRFSGSKSGNTASLTISGLLAEDEADYYCCSYAGSYTLGVFGT

SEQ ID NO: 1500 - DNA, 129 bp, Artificial Sequence
  Description of Artificial Sequence: Synthetic antibody
gttcgcttctctggctccaagtctggcaacacggcctccctgaccatctctgggctccaggctgaggatgaggctgattattactgctgctcatatgcaggcagctacactttgggtgtcttcggaact

SEQ ID NO: 1501 - protein, 43 aa, Artificial Sequence
  Description of Artificial Sequence: Synthetic antibody
VRFSGSKSGNTASLTISGLQAEDEADYYCCSYAGSYTLGVFGT

SEQ ID NO: 1502 - DNA, 129 bp, Artificial Sequence
  Description of Artificial Sequence: Synthetic antibody
gatcgcttctctggctccaagtctggcaagacggcctgcctgaccatctctgggctccaggctgaggatgaggctgattattactgctgctcatatgcaggcagctacactttgggggtcttcggaact

SEQ ID NO: 1503 - protein, 43 aa, Artificial Sequence
  Description of Artificial Sequence: Synthetic antibody
DRFSGSKSGKTACLTISGLQAEDEADYYCCSYAGSYTLGVFGT

SEQ ID NO: 1504 - DNA, 129 bp, Artificial Sequence
  Description of Artificial Sequence: Synthetic antibody
gatcgcttctctggctccaagtctggcaactcggcctccctgacgatctctgggctccaggctgaggatgaggctgattattactgctgctcatatgcaggcagctacactttgggggtcttcggaact

SEQ ID NO: 1505 - protein, 43 aa, Artificial Sequence
  Description of Artificial Sequence: Synthetic antibody
DRFSGSKSGNSASLTISGLQAEDEADYYCCSYAGSYTLGVFGT

SEQ ID NO: 1506 - DNA, 129 bp, Artificial Sequence
  Description of Artificial Sequence: Synthetic antibody
gatcgcttctctggctccaagtctggcaacacggcctccctgaccatctctgggctccaggctgaggatgaggctgattattactgctgctcatatgcaggcagctacactttgggggtcttcggaact

SEQ ID NO: 1507 - protein, 43 aa, Artificial Sequence
  Description of Artificial Sequence: Synthetic antibody
DRFSGSKSGNTASLTISGLQAEDEADYYCCSYAGSYTLGVFGT

SEQ ID NO: 1508 - DNA, 129 bp, Artificial Sequence
  Description of Artificial Sequence: Synthetic antibody
atccgcttctctggctccaagtctggcaacacggcctccctgaccatctctgggctccaggctgaggatgaggctgattattactgctgctcatatgcaggcagctacactttgggggtcttcggaact

SEQ ID NO: 1509 - protein, 43 aa, Artificial Sequence
  Description of Artificial Sequence: Synthetic antibody
IRFSGSKSGNTASLTISGLQAEDEADYYCCSYAGSYTLGVFGT

SEQ ID NO: 1510 - protein, 11 aa, Artificial Sequence
  Description of Artificial Sequence: Synthetic antibody
CSSPDSNTVVF

SEQ ID NO: 1511 - DNA, 129 bp, Artificial Sequence
  Description of Artificial Sequence: Synthetic antibody
tctcatcgcttctctggtaccaagtctggctacacggcctccctgactatctctgggctccaggctgaggacgaggctgattattactgctgttcatctccagatagtaacactgttgtgttcggagga

SEQ ID NO: 1512 - protein, 43 aa, Artificial Sequence
  Description of Artificial Sequence: Synthetic antibody
SHRFSGTKSGYTASLTISGLQAEDEADYYCCSSPDSNTVVFGG

SEQ ID NO: 1513 - DNA, 129 bp, Artificial Sequence
  Description of Artificial Sequence: Synthetic antibody
tctcatcgcttctctggtaccaagtctggcaacacggcctccctgacaatctctgggctccaggctgaggacgaggctgattattactgctgttcatctccagatagtaacactgttgtgttcggagga

SEQ ID NO: 1514 - protein, 43 aa, Artificial Sequence
  Description of Artificial Sequence: Synthetic antibody
SHRFSGTKSGNTASLTISGLQAEDEADYYCCSSPDSNTVVFGG

SEQ ID NO: 1515 - DNA, 129 bp, Artificial Sequence
  Description of Artificial Sequence: Synthetic antibody
tctattcgcttctctggctccaactctggcgacacggcctccctgactatctctggactccaggctgaggacgaggctgattattactgctgttcatctccagacagtaatactgttgtgttcggagga

SEQ ID NO: 1516 - protein, 43 aa, Artificial Sequence
  Description of Artificial Sequence: Synthetic antibody
SIRFSGSNSGDTASLTISGLQAEDEADYYCCSSPDSNTVVFGG

SEQ ID NO: 1517 - DNA, 129 bp, Artificial Sequence
  Description of Artificial Sequence: Synthetic antibody
tctaatcgcttctctggctccaactctggcgacacggcctccctgacaatctctggactccaggctgaggacgaggctgattattactgctgttcatctccagacagtaatactgttgtgttcggagga

SEQ ID NO: 1518 - protein, 43 aa, Artificial Sequence
  Description of Artificial Sequence: Synthetic antibody
SNRFSGSNSGDTASLTISGLQAEDEADYYCCSSPDSNTVVFGG

SEQ ID NO: 1519 - DNA, 129 bp, Artificial Sequence
  Description of Artificial Sequence: Synthetic antibody
cttattcgcttctctggctccaactctggcgacacggcctccctgacaatctctggactccaggctgaggacgaggctgattattactgctgttcatctccagacagtaatactgttgtgttcggagga

SEQ ID NO: 1520 - protein, 43 aa, Artificial Sequence
  Description of Artificial Sequence: Synthetic antibody
LIRFSGSNSGDTASLTISGLQAEDEADYYCCSSPDSNTVVFGG

SEQ ID NO: 1521 - DNA, 129 bp, Artificial Sequence
  Description of Artificial Sequence: Synthetic antibody
ctcatccgcttctctggtaccaagtctggcaacacggcctccctgacaatctctgggctccaggctgaggacgaggctgattattactgctgttcatctccagatagtaacactgttgtgttcggagga

SEQ ID NO: 1522 - protein, 43 aa, Artificial Sequence
  Description of Artificial Sequence: Synthetic antibody
LIRFSGTKSGNTASLTISGLQAEDEADYYCCSSPDSNTVVFGG

SEQ ID NO: 1523 - protein, 11 aa, Artificial Sequence
  Description of Artificial Sequence: Synthetic antibody
CSYAGTYSLVF

SEQ ID NO: 1524 - DNA, 129 bp, Artificial Sequence
  Description of Artificial Sequence: Synthetic antibody
cctggccgcttctctggctccaagtctggcaacacggcctccctgaccatctctgggctccaggctgaggatgaggctgattattactgctgctcatatgcaggcacctactccttggtgttcggcgga

SEQ ID NO: 1525 - protein, 43 aa, Artificial Sequence
  Description of Artificial Sequence: Synthetic antibody
PGRFSGSKSGNTASLTISGLQAEDEADYYCCSYAGTYSLVFGG

SEQ ID NO: 1526 - DNA, 129 bp, Artificial Sequence
  Description of Artificial Sequence: Synthetic antibody
cctgatcgcttctctggctcgaagtctggcaacacggcctccctgaccatctctgtgctccaggctgaggatgaggctgattattactgctgctcatatgcaggcacctactccttggtgttcggcgga

SEQ ID NO: 1527 - protein, 43 aa, Artificial Sequence
  Description of Artificial Sequence: Synthetic antibody
PDRFSGSKSGNTASLTISVLQAEDEADYYCCSYAGTYSLVFGG

SEQ ID NO: 1528 - DNA, 129 bp, Artificial Sequence
  Description of Artificial Sequence: Synthetic antibody
cctgatcgcttctctggctccacggctggcaacacggcctccctgaccatctctgggctccaggctgaggatgaggctgattattactgctgctcatatgcaggcacctactccttggtgttcggcgga

SEQ ID NO: 1529 - protein, 43 aa, Artificial Sequence
  Description of Artificial Sequence: Synthetic antibody
PDRFSGSTAGNTASLTISGLQAEDEADYYCCSYAGTYSLVFGG

SEQ ID NO: 1530 - DNA, 129 bp, Artificial Sequence
  Description of Artificial Sequence: Synthetic antibody
cctgatcgcttctctggctccaagtctggcaacacggcctccctggccatctctgggccccaggctgaggatgaggctgattattactgctgctcatatgcaggcacctactccttggtgttcggcgga

SEQ ID NO: 1531 - protein, 43 aa, Artificial Sequence
  Description of Artificial Sequence: Synthetic antibody
PDRFSGSKSGNTASLAISGPQAEDEADYYCCSYAGTYSLVFGG

SEQ ID NO: 1532 - DNA, 129 bp, Artificial Sequence
  Description of Artificial Sequence: Synthetic antibody
cctgatcgcttctctggctccaagtctggcaacacggcctccctgaccatctctgggctccaggctgaggatgaggctgattattactgctgctcatatgcaggcacctactccttggtgttcggcgga

SEQ ID NO: 1533 - protein, 43 aa, Artificial Sequence
  Description of Artificial Sequence: Synthetic antibody
PDRFSGSKSGNTASLTISGLQAEDEADYYCCSYAGTYSLVFGG

SEQ ID NO: 1534 - DNA, 129 bp, Artificial Sequence
  Description of Artificial Sequence: Synthetic antibody
cctgatcgcttccctggctccatgtctggcaacacggcctccctgaccatctctgggctccaggctgaggatgaggctgattattactgctgctcatatgcaggcacctactccttggtgttcggcgga

SEQ ID NO: 1535 - protein, 43 aa, Artificial Sequence
  Description of Artificial Sequence: Synthetic antibody
PDRFPGSMSGNTASLTISGLQAEDEADYYCCSYAGTYSLVFGG

SEQ ID NO: 1536 - protein, 11 aa, Artificial Sequence
  Description of Artificial Sequence: Synthetic antibody
CSYASSSTLVF

SEQ ID NO: 1537 - DNA, 129 bp, Artificial Sequence
  Description of Artificial Sequence: Synthetic antibody
tcttatcgcttctctggctccaagtctggcaacacggcctccctgacaatctctgggctccaggctgaggacgaggctgattattactgctgctcatatgctagtagtagcactttagtgttcggcgga

SEQ ID NO: 1538 - protein, 43 aa, Artificial Sequence
  Description of Artificial Sequence: Synthetic antibody
SYRFSGSKSGNTASLTISGLQAEDEADYYCCSYASSSTLVFGG

SEQ ID NO: 1539 - DNA, 129 bp, Artificial Sequence
  Description of Artificial Sequence: Synthetic antibody
tctaatcgcttctctggctccaagtctggctacacggcctccctgacattctctgggctccaggctgaggacgaggctgattattactgctgctcatatgcaagtagtagcactttagtgttcggcgga

SEQ ID NO: 1540 - protein, 43 aa, Artificial Sequence
  Description of Artificial Sequence: Synthetic antibody
SNRFSGSKSGYTASLTFSGLQAEDEADYYCCSYASSSTLVFGG

SEQ ID NO: 1541 - DNA, 129 bp, Artificial Sequence
  Description of Artificial Sequence: Synthetic antibody
tctaatcgcttctctggctccaagtctggcaacactgcctccctgagaatctctgggctccaggctgaggacgaggctgattattactgctgctcatatgcaagtagtagcactttagtgttcggcgga

SEQ ID NO: 1542 - protein, 43 aa, Artificial Sequence
  Description of Artificial Sequence: Synthetic antibody
SNRFSGSKSGNTASLRISGLQAEDEADYYCCSYASSSTLVFGG

SEQ ID NO: 1543 - DNA, 129 bp, Artificial Sequence
  Description of Artificial Sequence: Synthetic antibody
tctaatcgcttctctggctccaagtctggcaacacggcctccctgacaatctctgggctccaggctgaggacgaggctgattattactgctgctcatatgcaagtagtagcactttagtgttcggcgga

SEQ ID NO: 1544 - protein, 43 aa, Artificial Sequence
  Description of Artificial Sequence: Synthetic antibody
SNRFSGSKSGNTASLTISGLQAEDEADYYCCSYASSSTLVFGG

SEQ ID NO: 1545 - DNA, 129 bp, Artificial Sequence
  Description of Artificial Sequence: Synthetic antibody
tctaatcgcttctctggctccaagtccggcaacacggcctccctgacaatctctgggctccaggctgaggacgaggctgattattactgctgctcatatgcaagtagtagcactttagtgttcagcgga

SEQ ID NO: 1546 - protein, 43 aa, Artificial Sequence
  Description of Artificial Sequence: Synthetic antibody
SNRFSGSKSGNTASLTISGLQAEDEADYYCCSYASSSTLVFSG

SEQ ID NO: 1547 - DNA, 129 bp, Artificial Sequence
  Description of Artificial Sequence: Synthetic antibody
ctaatccgcttctctggctccaagtctggcaacacggcctccctgacaatctctgggctccaggctgaggacgaggctgattattactgctgctcatatgcaagtagtagcactttagtgttcggcgga

SEQ ID NO: 1548 - protein, 43 aa, Artificial Sequence
  Description of Artificial Sequence: Synthetic antibody
LIRFSGSKSGNTASLTISGLQAEDEADYYCCSYASSSTLVFGG

SEQ ID NO: 1549 - protein, 11 aa, Artificial Sequence
  Description of Artificial Sequence: Synthetic antibody
CSFAGSHTYVF

SEQ ID NO: 1550 - DNA, 129 bp, Artificial Sequence
  Description of Artificial Sequence: Synthetic antibody
ctgatccgcttctctggctccaagtctggcaacacggcctccctgaccatctctgggctccaggctgaggatgaggctgattattactgctgctcatttgcaggcagccacacttatgtcttcggaact

SEQ ID NO: 1551 - protein, 43 aa, Artificial Sequence
  Description of Artificial Sequence: Synthetic antibody
LIRFSGSKSGNTASLTISGLQAEDEADYYCCSFAGSHTYVFGT

SEQ ID NO: 1552 - DNA, 129 bp, Artificial Sequence
  Description of Artificial Sequence: Synthetic antibody
ctgatacgcttctctggctccaagtctggcaacacggcctccctgaccatctctgggctccaggctgaggatgaggctgattattactgctgctcatttgcaggcagccacacttatgtcttcggaact

SEQ ID NO: 1553 - DNA, 129 bp, Artificial Sequence
  Description of Artificial Sequence: Synthetic antibody
cctgatcgcttctctggctccaagtctggcatcacggcctccctgaccatctctgggctccagtctgaggatgaggctgattattactgctgctcatttgcaggcagccacacttatgtcttcggaact

SEQ ID NO: 1554 - protein, 43 aa, Artificial Sequence
  Description of Artificial Sequence: Synthetic antibody
PDRFSGSKSGITASLTISGLQSEDEADYYCCSFAGSHTYVFGT

SEQ ID NO: 1555 - DNA, 129 bp, Artificial Sequence
  Description of Artificial Sequence: Synthetic antibody
cctgatcgcttctctggctccaagtctggcaacacggcctccctgaccatctctgggctccaggctgaggatgaggctgattattactgctgctcatttgcaggcagccacacttatgtcttcggaact

SEQ ID NO: 1556 - protein, 43 aa, Artificial Sequence
  Description of Artificial Sequence: Synthetic antibody
PDRFSGSKSGNTASLTISGLQAEDEADYYCCSFAGSHTYVFGT

SEQ ID NO: 1557 - DNA, 129 bp, Artificial Sequence
  Description of Artificial Sequence: Synthetic antibody
ccgtttcgcttctctggctccaagtctggcaacacggcctccctgaccatctctgggctccaggctgaggatgaggctgattattactgctgctcatttgcaggcagccacacttatgtcttcggaact

SEQ ID NO: 1558 - protein, 43 aa, Artificial Sequence
  Description of Artificial Sequence: Synthetic antibody
PFRFSGSKSGNTASLTISGLQAEDEADYYCCSFAGSHTYVFGT

SEQ ID NO: 1559 - DNA, 129 bp, Artificial Sequence
  Description of Artificial Sequence: Synthetic antibody
cctgatcgcttctctggctccaagtctggctacacggcctccctgaccatctctgggctccaggctgaggatgaggctgattattactgctgctcatttgcaggcagccacacttatgtcttcggaact

SEQ ID NO: 1560 - protein, 43 aa, Artificial Sequence
  Description of Artificial Sequence: Synthetic antibody
PDRFSGSKSGYTASLTISGLQAEDEADYYCCSFAGSHTYVFGT

SEQ ID NO: 1561 - protein, 11 aa, Artificial Sequence
  Description of Artificial Sequence: Synthetic antibody
CSYAGSSIYVF

SEQ ID NO: 1562 - DNA, 129 bp, Artificial Sequence
  Description of Artificial Sequence: Synthetic antibody
tctattcgcttctctggctccaagtctggcatcacggcctccctgacaatctctgggctccagtctgaggacgaggctgattattactgctgctcatatgcaggtagtagcatttatgtcttcggaact

SEQ ID NO: 1563 - protein, 43 aa, Artificial Sequence
  Description of Artificial Sequence: Synthetic antibody
SIRFSGSKSGITASLTISGLQSEDEADYYCCSYAGSSIYVFGT

SEQ ID NO: 1564 - DNA, 129 bp, Artificial Sequence
  Description of Artificial Sequence: Synthetic antibody
tctaatcgcttctctggctccgagtccggcaacacggcctccctgacaatctctgggctccaggctgaggacgaggctgattattactgctgctcatatgcaggtagtagcatttatgtcttcggaact

SEQ ID NO: 1565 - protein, 43 aa, Artificial Sequence
  Description of Artificial Sequence: Synthetic antibody
SNRFSGSESGNTASLTISGLQAEDEADYYCCSYAGSSIYVFGT

SEQ ID NO: 1566 - DNA, 129 bp, Artificial Sequence
  Description of Artificial Sequence: Synthetic antibody
tctaatcgcttctctggctccaagtctggtaacacggcctccctgacaatctctgggccccaggctgaggacgaggctgattattactgctgctcatatgcaggtagtagcatttatgtcttcggaact

SEQ ID NO: 1567 - protein, 43 aa, Artificial Sequence
  Description of Artificial Sequence: Synthetic antibody
SNRFSGSKSGNTASLTISGPQAEDEADYYCCSYAGSSIYVFGT

SEQ ID NO: 1568 - DNA, 129 bp, Artificial Sequence
  Description of Artificial Sequence: Synthetic antibody
tctaatcgcttctctggctccaagtctggcaactcggcctccctgagaatctctgggctccaggctgaggacgaggctgattattactgctgctcatatgcaggtagtagcatttatgtcttcggaact

SEQ ID NO: 1569 - protein, 43 aa, Artificial Sequence
  Description of Artificial Sequence: Synthetic antibody
SNRFSGSKSGNSASLRISGLQAEDEADYYCCSYAGSSIYVFGT

SEQ ID NO: 1570 - DNA, 129 bp, Artificial Sequence
  Description of Artificial Sequence: Synthetic antibody
tctaatcgcttctctggctccaagtctggcaacacggcctccctgacaatctctgggctccaggctgaggacgaggctgattattactgctgctcatatgcaggtagtagcatttatgtcttcggaact

SEQ ID NO: 1571 - protein, 43 aa, Artificial Sequence
  Description of Artificial Sequence: Synthetic antibody
SNRFSGSKSGNTASLTISGLQAEDEADYYCCSYAGSSIYVFGT

SEQ ID NO: 1572 - DNA, 129 bp, Artificial Sequence
  Description of Artificial Sequence: Synthetic antibody
ctaatccgcttctctggctccaagtctggcaacacggcctccctgacaatctctgggctccaggctgaggacgaggctgattattactgctgctcatatgcaggtagtagcatttatgtcttcggaact

SEQ ID NO: 1573 - protein, 43 aa, Artificial Sequence
  Description of Artificial Sequence: Synthetic antibody
LIRFSGSKSGNTASLTISGLQAEDEADYYCCSYAGSSIYVFGT

SEQ ID NO: 1574 - protein, 11 aa, Artificial Sequence
  Description of Artificial Sequence: Synthetic antibody
CSYAGSSTKVF

SEQ ID NO: 1575 - DNA, 129 bp, Artificial Sequence
  Description of Artificial Sequence: Synthetic antibody
tctagtcgcttctctggctccaagtctggcaacacggcctccctgacaatctctgggctccaggctgaggacgaggctgattattaccgctgctcatatgcaggtagtagcacaaaggtgttcggcgga

SEQ ID NO: 1576 - protein, 43 aa, Artificial Sequence
  Description of Artificial Sequence: Synthetic antibody
SSRFSGSKSGNTASLTISGLQAEDEADYYRCSYAGSSTKVFGG

SEQ ID NO: 1577 - DNA, 129 bp, Artificial Sequence
  Description of Artificial Sequence: Synthetic antibody
tctaatcgcttctctggctccaagtctggccacccggcctccctgacaatctctgggctccaggctgaggacgaggctgattattactgctgctcatatgcaggtagtagcacaaaggtgttcggcgga

SEQ ID NO: 1578 - protein, 43 aa, Artificial Sequence
  Description of Artificial Sequence: Synthetic antibody
SNRFSGSKSGHPASLTISGLQAEDEADYYCCSYAGSSTKVFGG

SEQ ID NO: 1579 - DNA, 129 bp, Artificial Sequence
  Description of Artificial Sequence: Synthetic antibody
tctaatcgcttctctggctccaagtctggcaagacggcctccctgacaatctctgtgctccaggctgaggacgaggctgattattactgctgctcatatgcaggtagtagcacaaaggtgttcggcgga

SEQ ID NO: 1580 - protein, 43 aa, Artificial Sequence
  Description of Artificial Sequence: Synthetic antibody
SNRFSGSKSGKTASLTISVLQAEDEADYYCCSYAGSSTKVFGG

SEQ ID NO: 1581 - DNA, 129 bp, Artificial Sequence
  Description of Artificial Sequence: Synthetic antibody
tctaatcgcttctctggctccaagtctggcaactcggcctcgctgacaatctctgggctccaggctgaggacgaggctgattattactgctgctcatatgcaggtagtagcacaaaggtgttcggcgga

SEQ ID NO: 1582 - protein, 43 aa, Artificial Sequence
  Description of Artificial Sequence: Synthetic antibody
SNRFSGSKSGNSASLTISGLQAEDEADYYCCSYAGSSTKVFGG

SEQ ID NO: 1583 - DNA, 129 bp, Artificial Sequence
  Description of Artificial Sequence: Synthetic antibody
tctaatcgcttctctggctccaagtctggcaacacggcctccctgacaatctctgggctccaggctgaggacgaggctgattattactgctgctcatatgcaggtagtagcacaaaggtgttcggcgga

SEQ ID NO: 1584 - protein, 43 aa, Artificial Sequence
  Description of Artificial Sequence: Synthetic antibody
SNRFSGSKSGNTASLTISGLQAEDEADYYCCSYAGSSTKVFGG

SEQ ID NO: 1585 - DNA, 129 bp, Artificial Sequence
  Description of Artificial Sequence: Synthetic antibody
ctaatccgcttctctggctccaagtctggcaacacggcctccctgacaatctctgggctccaggctgaggacgaggctgattattactgctgctcatatgcaggtagtagcacaaaggtgttcggcgga

SEQ ID NO: 1586 - protein, 43 aa, Artificial Sequence
  Description of Artificial Sequence: Synthetic antibody
LIRFSGSKSGNTASLTISGLQAEDEADYYCCSYAGSSTKVFGG

SEQ ID NO: 1587 - protein, 11 aa, Artificial Sequence
  Description of Artificial Sequence: Synthetic antibody
CSYAGSYLYVF

SEQ ID NO: 1588 - DNA, 129 bp, Artificial Sequence
  Description of Artificial Sequence: Synthetic antibody
cgtgatcgcttctctggctccaagtctggcaacactgcctccctgaccatctctgggctccaggctgaggatgaggctgattattactgctgctcatatgcaggcagctacctctatgtcttcggaact

SEQ ID NO: 1589 - protein, 43 aa, Artificial Sequence
  Description of Artificial Sequence: Synthetic antibody
RDRFSGSKSGNTASLTISGLQAEDEADYYCCSYAGSYLYVFGT

SEQ ID NO: 1590 - DNA, 129 bp, Artificial Sequence
  Description of Artificial Sequence: Synthetic antibody
cctgatcgcttctctggctccaagtctggctacacggcctccctgacgatctctgggctccaggctgaggatgaggctgattattactgctgctcatatgcaggcagctacctctatgtcttcggaact

SEQ ID NO: 1591 - protein, 43 aa, Artificial Sequence
  Description of Artificial Sequence: Synthetic antibody
PDRFSGSKSGYTASLTISGLQAEDEADYYCCSYAGSYLYVFGT

SEQ ID NO: 1592 - DNA, 129 bp, Artificial Sequence
  Description of Artificial Sequence: Synthetic antibody
cctgatcgcttctctggctccaagtctggcaactcggcctccctgaccatctcttggctccagactggggatgaggctgattattactgctgctcatatgcaggcagctacctttatgtcttcggaact

SEQ ID NO: 1593 - protein, 43 aa, Artificial Sequence
  Description of Artificial Sequence: Synthetic antibody
PDRFSGSKSGNSASLTISWLQTGDEADYYCCSYAGSYLYVFGT

SEQ ID NO: 1594 - DNA, 129 bp, Artificial Sequence
  Description of Artificial Sequence: Synthetic antibody
cctgatcgcttctctggctccaagtctggcaacacggcctccctgaccatctctgggctccaggctgaggatgaggctgattattactgctgctcatatgcaggcagctacctctatgtcttcggaact

SEQ ID NO: 1595 - protein, 43 aa, Artificial Sequence
  Description of Artificial Sequence: Synthetic antibody
PDRFSGSKSGNTASLTISGLQAEDEADYYCCSYAGSYLYVFGT

SEQ ID NO: 1596 - DNA, 129 bp, Artificial Sequence
  Description of Artificial Sequence: Synthetic antibody
cctgatcgcttctctggctccaagtctggcaacacggcctccctgaccatctctgggctccagactggggatgaggctgattattactgctgctcatatgcaggcagctacctttatgtcttcggaact

SEQ ID NO: 1597 - protein, 43 aa, Artificial Sequence
  Description of Artificial Sequence: Synthetic antibody
PDRFSGSKSGNTASLTISGLQTGDEADYYCCSYAGSYLYVFGT

SEQ ID NO: 1598 - DNA, 129 bp, Artificial Sequence
  Description of Artificial Sequence: Synthetic antibody
cctgatcgcttctctgaccccaagtctggcaacacggcctccctgaccatctctgggctccaggctgaggatgaggctgattattactgctgctcatatgcaggcagctacctctatgtcttcggaact

SEQ ID NO: 1599 - protein, 43 aa, Artificial Sequence
  Description of Artificial Sequence: Synthetic antibody
PDRFSDPKSGNTASLTISGLQAEDEADYYCCSYAGSYLYVFGT

SEQ ID NO: 1600 - protein, 11 aa, Artificial Sequence
  Description of Artificial Sequence: Synthetic antibody
CSYAGSSIVVF

SEQ ID NO: 1601 - DNA, 129 bp, Artificial Sequence
  Description of Artificial Sequence: Synthetic antibody
tctaatcgcttctctggctccaagtctgggaacacgggctccctgactatctctgggctccaggctgaggacgaggctgattattactgctgctcatatgcaggtagtagcattgtggtattcggcgga

SEQ ID NO: 1602 - protein, 43 aa, Artificial Sequence
  Description of Artificial Sequence: Synthetic antibody
SNRFSGSKSGNTGSLTISGLQAEDEADYYCCSYAGSSIVVFGG

SEQ ID NO: 1603 - DNA, 129 bp, Artificial Sequence
  Description of Artificial Sequence: Synthetic antibody
tctaatcgcttctctggctccaagtctggcaacacggcctccctgacattctctgggctcctggctgaggacgaggctgattattactgctgctcatatgcaggtagtagcattgtggtattcggcgga

SEQ ID NO: 1604 - protein, 43 aa, Artificial Sequence
  Description of Artificial Sequence: Synthetic antibody
SNRFSGSKSGNTASLTFSGLLAEDEADYYCCSYAGSSIVVFGG

SEQ ID NO: 1605 - DNA, 129 bp, Artificial Sequence
  Description of Artificial Sequence: Synthetic antibody
tctaatcgcttctctggctccaagtctggcaacacggcctccctgacaatctctgggctccaggctgaggacgaggctgattattactgctgctcatatgcaggtagtagcattgtggtattcggcgga

SEQ ID NO: 1606 - protein, 43 aa, Artificial Sequence
  Description of Artificial Sequence: Synthetic antibody
SNRFSGSKSGNTASLTISGLQAEDEADYYCCSYAGSSIVVFGG

SEQ ID NO: 1607 - DNA, 129 bp, Artificial Sequence
  Description of Artificial Sequence: Synthetic antibody
tctaatcgcttctctggctccaagtctggcaacacggcctccctcacaatctctgggctccaggctgaggacgaggctgattattacttctgctcatatgcaggtagtagcattgtggtattcggcgga

SEQ ID NO: 1608 - protein, 43 aa, Artificial Sequence
  Description of Artificial Sequence: Synthetic antibody
SNRFSGSKSGNTASLTISGLQAEDEADYYFCSYAGSSIVVFGG

SEQ ID NO: 1609 - DNA, 129 bp, Artificial Sequence
  Description of Artificial Sequence: Synthetic antibody
ctaattcgcttctctggctccaagtctggcaacacggcctccctgacaatctctgggctccaggctgaggacgaggctgattattactgctgctcatatgcaggtagtagcattgtggtattcggcgga

SEQ ID NO: 1610 - protein, 43 aa, Artificial Sequence
  Description of Artificial Sequence: Synthetic antibody
LIRFSGSKSGNTASLTISGLQAEDEADYYCCSYAGSSIVVFGG

SEQ ID NO: 1611 - DNA, 129 bp, Artificial Sequence
  Description of Artificial Sequence: Synthetic antibody
ctaatccgcttctctggctccaagtctggcaacacggcctccctgacaatctctgggctccaggctgaggacgaggctgattattactgctgctcatatgcaggtagtagcattgtggtattcggcgga

SEQ ID NO: 1612 - protein, 12 aa, Artificial Sequence
  Description of Artificial Sequence: Synthetic antibody
CSYAGSRTPVVF

SEQ ID NO: 1613 - DNA, 129 bp, Artificial Sequence
  Description of Artificial Sequence: Synthetic antibody
aatcgcttctctggctccaagtctgtcaacacggcctccctgacaatctctgggctccaggctgaggacgatgctgattattactgctgctcatatgcaggaagtagaactcccgtggtattcggcgga

SEQ ID NO: 1614 - protein, 43 aa, Artificial Sequence
  Description of Artificial Sequence: Synthetic antibody
NRFSGSKSVNTASLTISGLQAEDDADYYCCSYAGSRTPVVFGG

SEQ ID NO: 1615 - DNA, 129 bp, Artificial Sequence
  Description of Artificial Sequence: Synthetic antibody
aatcgcttctctggctccaagtctggctacagggcctccctgacaatctctgggctccaggctgaggacgaggctgattattactgctgctcatatgcaggaagtagaactcccgtggtattcggcgga

SEQ ID NO: 1616 - protein, 43 aa, Artificial Sequence
  Description of Artificial Sequence: Synthetic antibody
NRFSGSKSGYRASLTISGLQAEDEADYYCCSYAGSRTPVVFGG

SEQ ID NO: 1617 - DNA, 129 bp, Artificial Sequence
  Description of Artificial Sequence: Synthetic antibody
aatcgcttctctggctccaagtctggcatgacggcctccctgacaatctctgggctccaggctgaggacgaggctgattattactgctgctcatatgcaggaagtagaactcccgtggttttcggcgga

SEQ ID NO: 1618 - protein, 43 aa, Artificial Sequence
  Description of Artificial Sequence: Synthetic antibody
NRFSGSKSGMTASLTISGLQAEDEADYYCCSYAGSRTPVVFGG

SEQ ID NO: 1619 - DNA, 129 bp, Artificial Sequence
  Description of Artificial Sequence: Synthetic antibody
aatcgcttctctggctccaagtctggcaacactgcctccctgacaatctctgggctcctggctgaggacgaggctgattattactgctgctcatatgcaggaagtagaactcccgtggtattcggcgga

SEQ ID NO: 1620 - protein, 43 aa, Artificial Sequence
  Description of Artificial Sequence: Synthetic antibody
NRFSGSKSGNTASLTISGLLAEDEADYYCCSYAGSRTPVVFGG

SEQ ID NO: 1621 - DNA, 129 bp, Artificial Sequence
  Description of Artificial Sequence: Synthetic antibody
aatcgcttctctggctccaagtctggcaacacggcctccctgacaatctctgggctccaggctgaggacgaggctgattattactgctgctcatatgcaggaagtagaactcccgtggtattcggcgga

SEQ ID NO: 1622 - protein, 43 aa, Artificial Sequence
  Description of Artificial Sequence: Synthetic antibody
NRFSGSKSGNTASLTISGLQAEDEADYYCCSYAGSRTPVVFGG

SEQ ID NO: 1623 - DNA, 129 bp, Artificial Sequence
  Description of Artificial Sequence: Synthetic antibody
aatcgcttctctggccccaagtctggcaacacggcctgcctgacaatctctgggctccaggctgaggacgaggctgattattactgctgctcatatgcaggaagtagaactcccgtggtattcggcgga

SEQ ID NO: 1624 - protein, 43 aa, Artificial Sequence
  Description of Artificial Sequence: Synthetic antibody
NRFSGPKSGNTACLTISGLQAEDEADYYCCSYAGSRTPVVFGG

SEQ ID NO: 1625 - protein, 13 aa, Artificial Sequence
  Description of Artificial Sequence: Synthetic antibody
CSYAGSSTFDVVF

SEQ ID NO: 1626 - DNA, 129 bp, Artificial Sequence
  Description of Artificial Sequence: Synthetic antibody
cgcttctcttgctccaagtctggcaacacggcctccctgacaatctctgggctccaggctgaggacgaggctgattattactgctgctcatatgcaggtagcagcacttttgatgtggtattcggcgga

SEQ ID NO: 1627 - protein, 43 aa, Artificial Sequence
  Description of Artificial Sequence: Synthetic antibody
RFSCSKSGNTASLTISGLQAEDEADYYCCSYAGSSTFDVVFGG

SEQ ID NO: 1628 - DNA, 129 bp, Artificial Sequence
  Description of Artificial Sequence: Synthetic antibody
cgcttctctggctccatgtctggctacacggcctccctgacaatctctgggctccaggctgaggacgaggctgattattactgctgctcatatgcaggtagtagcacttttgatgtggtattcggcgga

SEQ ID NO: 1629 - protein, 43 aa, Artificial Sequence
  Description of Artificial Sequence: Synthetic antibody
RFSGSMSGYTASLTISGLQAEDEADYYCCSYAGSSTFDVVFGG

SEQ ID NO: 1630 - DNA, 129 bp, Artificial Sequence
  Description of Artificial Sequence: Synthetic antibody
cgcttctctggctccaagtctggcaactcggcctccgtgacaatctctgggctccaggctgaggacgaggctgattattactgctgctcatatgcaggtagtagcacttttgatgtggtattcggcgga

SEQ ID NO: 1631 - protein, 43 aa, Artificial Sequence
  Description of Artificial Sequence: Synthetic antibody
RFSGSKSGNSASVTISGLQAEDEADYYCCSYAGSSTFDVVFGG

SEQ ID NO: 1632 - DNA, 129 bp, Artificial Sequence
  Description of Artificial Sequence: Synthetic antibody
cgcttctctggctccaagtctggcaacacggcctgcctgacaatctctgggctccaggctgatgacgaggctgattattactgctgctcatatgcaggtagtagcacttttgatgtggtattcggcgga

SEQ ID NO: 1633 - protein, 43 aa, Artificial Sequence
  Description of Artificial Sequence: Synthetic antibody
RFSGSKSGNTACLTISGLQADDEADYYCCSYAGSSTFDVVFGG

SEQ ID NO: 1634 - DNA, 129 bp, Artificial Sequence
  Description of Artificial Sequence: Synthetic antibody
cgcttctctggctccaagtctggcaacacggcctccctgacaatctctgggctccaggctgaggacgaggctgattattactgctgctcatatgcaggtagtagcacttttgatgtggtattcggcgga

SEQ ID NO: 1635 - protein, 43 aa, Artificial Sequence
  Description of Artificial Sequence: Synthetic antibody
RFSGSKSGNTASLTISGLQAEDEADYYCCSYAGSSTFDVVFGG

SEQ ID NO: 1636 - DNA, 129 bp, Artificial Sequence
  Description of Artificial Sequence: Synthetic antibody
cgcttctctggctccaagtctggcaacacggcctccctgacaatctctgggctccaggctgaggacgaggctgattattactgctgctcatatgcaggtagtagcactttcgatgtggtattcggcgga

SEQ ID NO: 1637 - DNA, 129 bp, Artificial Sequence
  Description of Artificial Sequence: Synthetic antibody
ttctatcgcttctctggctccaagtctggcaacacggcctccctgacaatctctgggctccaggctgaggacgaggctgattattactgctgctcatatgcaggtagtagcactttagtcttcggaact

SEQ ID NO: 1638 - protein, 43 aa, Artificial Sequence
  Description of Artificial Sequence: Synthetic antibody
FYRFSGSKSGNTASLTISGLQAEDEADYYCCSYAGSSTLVFGT

SEQ ID NO: 1639 - DNA, 129 bp, Artificial Sequence
  Description of Artificial Sequence: Synthetic antibody
tcttatcgcttctctggctccaagtctggctacacggcctccctgacaatctctgggctccaggctgaggacgaggctgattattactgctgctcatatgcaggtagtagcactttagtcttcggaact

SEQ ID NO: 1640 - protein, 43 aa, Artificial Sequence
  Description of Artificial Sequence: Synthetic antibody
SYRFSGSKSGYTASLTISGLQAEDEADYYCCSYAGSSTLVFGT

SEQ ID NO: 1641 - DNA, 129 bp, Artificial Sequence
  Description of Artificial Sequence: Synthetic antibody
tcttatcgcttctctggctccaagtctggcatcacggcctccctgacaatctctgggctccaggctgaggacgaggctgattattactgctgctcatatgcaggtagtagcactttagtcttcggaact

SEQ ID NO: 1642 - protein, 43 aa, Artificial Sequence
  Description of Artificial Sequence: Synthetic antibody
SYRFSGSKSGITASLTISGLQAEDEADYYCCSYAGSSTLVFGT

SEQ ID NO: 1643 - DNA, 129 bp, Artificial Sequence
  Description of Artificial Sequence: Synthetic antibody
tctaatctcttctctggctccaagtctggcaagacggcctccctgacaatctctgggctccaggctgaggacgaggctgattattactgctgctcatatgcaggtagtagcactttggtcttcggaact

SEQ ID NO: 1644 - protein, 43 aa, Artificial Sequence
  Description of Artificial Sequence: Synthetic antibody
SNLFSGSKSGKTASLTISGLQAEDEADYYCCSYAGSSTLVFGT

SEQ ID NO: 1645 - DNA, 129 bp, Artificial Sequence
  Description of Artificial Sequence: Synthetic antibody
tctaatcgcttctctggctccaagtctggcaacacggcctccctgacaatctctgggctccaggctgaggacgaggctgattattactgctgctcatatgcaggtagtagcactttggtcttcggaact

SEQ ID NO: 1646 - protein, 43 aa, Artificial Sequence
  Description of Artificial Sequence: Synthetic antibody
SNRFSGSKSGNTASLTISGLQAEDEADYYCCSYAGSSTLVFGT

SEQ ID NO: 1647 - DNA, 129 bp, Artificial Sequence
  Description of Artificial Sequence: Synthetic antibody
tctaatcgcttctctggctccaagtctggcaacacggcctccctgacaatctctgggctccaggctgaggacgaggctgattattactgctgctcatatgcaggtagtagcactttagtcttcggaact

SEQ ID NO: 1648 - protein, 11 aa, Artificial Sequence
  Description of Artificial Sequence: Synthetic antibody
CSYAGSRLLVF

SEQ ID NO: 1649 - DNA, 129 bp, Artificial Sequence
  Description of Artificial Sequence: Synthetic antibody
ttctatcgcttctctggctccaagtctggcaacacggcctccctgacaatctctgggctccaggctgacgacgaggctgattattactgctgctcatatgcaggtagtcgcctcctggtattcggcgga

SEQ ID NO: 1650 - protein, 43 aa, Artificial Sequence
  Description of Artificial Sequence: Synthetic antibody
FYRFSGSKSGNTASLTISGLQADDEADYYCCSYAGSRLLVFGG

SEQ ID NO: 1651 - DNA, 129 bp, Artificial Sequence
  Description of Artificial Sequence: Synthetic antibody
tctattcgcttctctggctccaagtctggcaacacggcctccctgacaatctctgggctccaagctgacgacgaggctgattattactgctgctcatatgcaggtagtcgcctcctggtattcggcgga

SEQ ID NO: 1652 - protein, 43 aa, Artificial Sequence
  Description of Artificial Sequence: Synthetic antibody
SIRFSGSKSGNTASLTISGLQADDEADYYCCSYAGSRLLVFGG

SEQ ID NO: 1653 - DNA, 129 bp, Artificial Sequence
  Description of Artificial Sequence: Synthetic antibody
tctaatcgcttctctggctccaagtctggcatcacgggctccctgacaatctctgggctccaggctgacgacgaggctgattattactgctgctcatatgcaggtagtcgcctcctggtattcggcgga

SEQ ID NO: 1654 - protein, 43 aa, Artificial Sequence
  Description of Artificial Sequence: Synthetic antibody
SNRFSGSKSGITGSLTISGLQADDEADYYCCSYAGSRLLVFGG

SEQ ID NO: 1655 - DNA, 129 bp, Artificial Sequence
  Description of Artificial Sequence: Synthetic antibody
tctaatcgcttctctggctccaagtctggcaacacggcctccctgacaatctctgggctccaggctgacgacgaggctgattattactgctgctcatatgcaggtagtcgcctcctggtattcggcgga

SEQ ID NO: 1656 - protein, 43 aa, Artificial Sequence
  Description of Artificial Sequence: Synthetic antibody
SNRFSGSKSGNTASLTISGLQADDEADYYCCSYAGSRLLVFGG

SEQ ID NO: 1657 - DNA, 129 bp, Artificial Sequence
  Description of Artificial Sequence: Synthetic antibody
tcaaatcgcttctctggctccaagtctggcaacacggcctccctgacaatctctgggccccaggctgacgacgaggctgattattactgctgctcatatgcaggtagtcgcctcctggtattcggcgga

SEQ ID NO: 1658 - protein, 43 aa, Artificial Sequence
  Description of Artificial Sequence: Synthetic antibody
SNRFSGSKSGNTASLTISGPQADDEADYYCCSYAGSRLLVFGG

SEQ ID NO: 1659 - protein, 11 aa, Artificial Sequence
  Description of Artificial Sequence: Synthetic antibody
CSYAGSYTFVF

SEQ ID NO: 1660 - DNA, 129 bp, Artificial Sequence
  Description of Artificial Sequence: Synthetic antibody
cctgatcgcttctctggctccaagtctggctacactgcctccctgaccatctctgggctccaggctgaggatgaggctgattattactgctgctcatatgcaggcagctacactttcgtattcggcgga

SEQ ID NO: 1661 - protein, 43 aa, Artificial Sequence
  Description of Artificial Sequence: Synthetic antibody
PDRFSGSKSGYTASLTISGLQAEDEADYYCCSYAGSYTFVFGG

SEQ ID NO: 1662 - DNA, 129 bp, Artificial Sequence
  Description of Artificial Sequence: Synthetic antibody
cctgatcgcttctctggctccaagtctggcaagacgggctccctgaccatctctgggctccaggctgaggatgaggctgattattactgctgctcatatgcaggcagctacactttcgtattcggcgga

SEQ ID NO: 1663 - protein, 43 aa, Artificial Sequence
  Description of Artificial Sequence: Synthetic antibody
PDRFSGSKSGKTGSLTISGLQAEDEADYYCCSYAGSYTFVFGG

SEQ ID NO: 1664 - DNA, 129 bp, Artificial Sequence
  Description of Artificial Sequence: Synthetic antibody
cctgatcgcttctctggctccaagtctggcaacacggcctccctgaccatctctgggctccaggctgaggatgaggctgattattactgctgctcatatgcaggcagctacactttcgtattcggcgga

SEQ ID NO: 1665 - protein, 43 aa, Artificial Sequence
  Description of Artificial Sequence: Synthetic antibody
PDRFSGSKSGNTASLTISGLQAEDEADYYCCSYAGSYTFVFGG

SEQ ID NO: 1666 - DNA, 129 bp, Artificial Sequence
  Description of Artificial Sequence: Synthetic antibody
cctgatcgcttctctggctccaagtctggcaacacggcctacctgaccatctctgggctccagtctgaggatgaggctgattattactgctgctcatatgcaggcagctacactttcgtattcggcgga

SEQ ID NO: 1667 - protein, 43 aa, Artificial Sequence
  Description of Artificial Sequence: Synthetic antibody
PDRFSGSKSGNTAYLTISGLQSEDEADYYCCSYAGSYTFVFGG

SEQ ID NO: 1668 - DNA, 129 bp, Artificial Sequence
  Description of Artificial Sequence: Synthetic antibody
ccgtttcgcttctctggctccaagtctggcaacacggcctccctgaccatctctgggctccaggctgaggatgaggctgattattactgctgctcatatgcaggcagctacactttcgtattcggcgga

SEQ ID NO: 1669 - protein, 43 aa, Artificial Sequence
  Description of Artificial Sequence: Synthetic antibody
PFRFSGSKSGNTASLTISGLQAEDEADYYCCSYAGSYTFVFGG

SEQ ID NO: 1670 - protein, 12 aa, Artificial Sequence
  Description of Artificial Sequence: Synthetic antibody
CSYAGSTTRVVF

SEQ ID NO: 1671 - DNA, 129 bp, Artificial Sequence
  Description of Artificial Sequence: Synthetic antibody
tatcgcttctctggctccaagtctggcaacacggcctccctgtcaatctctgggctccaggctgaggacgaggctgattattactgctgctcatatgcaggtagtaccactcgcgtggtattcggcgga

SEQ ID NO: 1672 - protein, 43 aa, Artificial Sequence
  Description of Artificial Sequence: Synthetic antibody
YRFSGSKSGNTASLSISGLQAEDEADYYCCSYAGSTTRVVFGG

SEQ ID NO: 1673 - DNA, 129 bp, Artificial Sequence
  Description of Artificial Sequence: Synthetic antibody
tatcgcttctctggctccaaggctggcaacacggcctccctgacaatctctgggctccaggctgaggacgaggctgattattactgctgctcatatgcaggtagtaccactcgcgtggtattcggcgga

SEQ ID NO: 1674 - protein, 43 aa, Artificial Sequence
  Description of Artificial Sequence: Synthetic antibody
YRFSGSKAGNTASLTISGLQAEDEADYYCCSYAGSTTRVVFGG

SEQ ID NO: 1675 - DNA, 129 bp, Artificial Sequence
  Description of Artificial Sequence: Synthetic antibody
attcgcttctctggctccaagtctggcaacacggcctccctgacaatctctgggctcgaggctgaggacgaggctgattattactgctgctcatatgcaggtagtaccactcgcgtggtattcggcgga

SEQ ID NO: 1676 - protein, 43 aa, Artificial Sequence
  Description of Artificial Sequence: Synthetic antibody
IRFSGSKSGNTASLTISGLEAEDEADYYCCSYAGSTTRVVFGG

SEQ ID NO: 1677 - DNA, 129 bp, Artificial Sequence
  Description of Artificial Sequence: Synthetic antibody
aatcgcttctctggctccaagtctggcaacacggcctccctgacaatctctgggctccaggctgaggacgaggctgattattactgctgctcatatgcaggtagtaccactcgcgtggtattcggcgga

SEQ ID NO: 1678 - protein, 43 aa, Artificial Sequence
  Description of Artificial Sequence: Synthetic antibody
NRFSGSKSGNTASLTISGLQAEDEADYYCCSYAGSTTRVVFGG

SEQ ID NO: 1679 - DNA, 129 bp, Artificial Sequence
  Description of Artificial Sequence: Synthetic antibody
attcgcttctctggctccaagtctggcaacacggcctccctgacaatctctgggctccaggctgaggacgaggctgattattactgctgctcatatgcaggtagtaccactcgcgtggtattcggcgga

SEQ ID NO: 1680 - protein, 43 aa, Artificial Sequence
  Description of Artificial Sequence: Synthetic antibody
IRFSGSKSGNTASLTISGLQAEDEADYYCCSYAGSTTRVVFGG

SEQ ID NO: 1681 - protein, 11 aa, Artificial Sequence
  Description of Artificial Sequence: Synthetic antibody
CSYAGFSTLVF

SEQ ID NO: 1682 - DNA, 129 bp, Artificial Sequence
  Description of Artificial Sequence: Synthetic antibody
tctaatcgcttctctggctccaagtctgtctacacggcctccctgacaatctcttggctccaggctgaggacgaggctcattactactgctgctcatatgcaggttttagcactttggtattcggcgga

SEQ ID NO: 1683 - protein, 43 aa, Artificial Sequence
  Description of Artificial Sequence: Synthetic antibody
SNRFSGSKSVYTASLTISWLQAEDEAHYYCCSYAGFSTLVFGG

SEQ ID NO: 1684 - DNA, 129 bp, Artificial Sequence
  Description of Artificial Sequence: Synthetic antibody
tctaatcgcttctctggctccaagtctgtcatcacggcctccctgacaatctctgggctccaggctgatgacgaggctcattactactgctgctcatatgcaggttttagcactttggtattcggcgga

SEQ ID NO: 1685 - protein, 43 aa, Artificial Sequence
  Description of Artificial Sequence: Synthetic antibody
SNRFSGSKSVITASLTISGLQADDEAHYYCCSYAGFSTLVFGG

SEQ ID NO: 1686 - DNA, 129 bp, Artificial Sequence
  Description of Artificial Sequence: Synthetic antibody
tctaatcgcttctctggctccaagtctgtcaagacggcctccctgacaatctctgggctccaggctgaggacggggctcattactactgctgctcatatgcaggttttagcactttggtattcggcgga

SEQ ID NO: 1687 - protein, 43 aa, Artificial Sequence
  Description of Artificial Sequence: Synthetic antibody
SNRFSGSKSVKTASLTISGLQAEDGAHYYCCSYAGFSTLVFGG

SEQ ID NO: 1688 - DNA, 129 bp, Artificial Sequence
  Description of Artificial Sequence: Synthetic antibody
tctaatcgcttctctggctccaagtctgtcaacacggcctccctgacaatctctgggctccaggctgaggacgaggctcattactactgctgctcatatgcaggttttagcactttggtattcggcgga

SEQ ID NO: 1689 - protein, 43 aa, Artificial Sequence
  Description of Artificial Sequence: Synthetic antibody
SNRFSGSKSVNTASLTISGLQAEDEAHYYCCSYAGFSTLVFGG

SEQ ID NO: 1690 - DNA, 129 bp, Artificial Sequence
  Description of Artificial Sequence: Synthetic antibody
ctaatccgcttctctggctccaagtctgtcaacacggcctccctgacaatctctgggctccaggctgaggacgaggctcattactactgctgctcatatgcaggttttagcactttggtattcggcgga

SEQ ID NO: 1691 - protein, 43 aa, Artificial Sequence
  Description of Artificial Sequence: Synthetic antibody
LIRFSGSKSVNTASLTISGLQAEDEAHYYCCSYAGFSTLVFGG

SEQ ID NO: 1692 - protein, 10 aa, Artificial Sequence
  Description of Artificial Sequence: Synthetic antibody
CSYAGSLYVF

SEQ ID NO: 1693 - DNA, 129 bp, Artificial Sequence
  Description of Artificial Sequence: Synthetic antibody
gtccctgatcgcttctctggctccaagtctggcgacacggcctccctgaccatctctgggctccaggctgaggatggggctgattattactgctgctcatatgcaggcagcctctatgtcttcggaact

SEQ ID NO: 1694 - protein, 43 aa, Artificial Sequence
  Description of Artificial Sequence: Synthetic antibody
VPDRFSGSKSGDTASLTISGLQAEDGADYYCCSYAGSLYVFGT

SEQ ID NO: 1695 - DNA, 129 bp, Artificial Sequence
  Description of Artificial Sequence: Synthetic antibody
gtccctgatcgcttctctggctccaagtctggcaacacggcctccctgaccatctctgggctccaggctgaggatgaggctgattattactgctgctcatatgcaggcagcctctatgtcttcggaact

SEQ ID NO: 1696 - protein, 43 aa, Artificial Sequence
  Description of Artificial Sequence: Synthetic antibody
VPDRFSGSKSGNTASLTISGLQAEDEADYYCCSYAGSLYVFGT

SEQ ID NO: 1697 - DNA, 129 bp, Artificial Sequence
  Description of Artificial Sequence: Synthetic antibody
gtccctgatagcttctctggctccaagtctggcaacacggcctccctgaccatgtctgggctccaggctgaggatgaggctgattattactgctgctcatatgcaggcagcctctatgtcttcggaact

SEQ ID NO: 1698 - protein, 43 aa, Artificial Sequence
  Description of Artificial Sequence: Synthetic antibody
VPDSFSGSKSGNTASLTMSGLQAEDEADYYCCSYAGSLYVFGT

SEQ ID NO: 1699 - DNA, 129 bp, Artificial Sequence
  Description of Artificial Sequence: Synthetic antibody
gtccatgatcgcttctctgtctccaagtctggcaacacggcctccctgaccatctctgggctccaggctgaggatgaggctgattattactgctgctcatatgcaggcagcctctatgtcttcggaact

SEQ ID NO: 1700 - protein, 43 aa, Artificial Sequence
  Description of Artificial Sequence: Synthetic antibody
VHDRFSVSKSGNTASLTISGLQAEDEADYYCCSYAGSLYVFGT

SEQ ID NO: 1701 - DNA, 129 bp, Artificial Sequence
  Description of Artificial Sequence: Synthetic antibody
ggacctgatcgcttctctggctccaagtctggcaacacggcctccctgaccatctctgggctccaggctgaggatgaggctgattattactgctgctcatatgcaggcagcctctatgtcttcggaact

SEQ ID NO: 1702 - protein, 43 aa, Artificial Sequence
  Description of Artificial Sequence: Synthetic antibody
GPDRFSGSKSGNTASLTISGLQAEDEADYYCCSYAGSLYVFGT

SEQ ID NO: 1703 - protein, 11 aa, Artificial Sequence
  Description of Artificial Sequence: Synthetic antibody
CSYAGSRYVVF

SEQ ID NO: 1704 - DNA, 129 bp, Artificial Sequence
  Description of Artificial Sequence: Synthetic antibody
tgtaatcgcttctctggctccaagtctggcaacacggcctccctgacaatctctgtgctccaggctgaggacgaggctgattattactgctgctcatatgcaggtagtagatatgtggtattcggcgga

SEQ ID NO: 1705 - protein, 43 aa, Artificial Sequence
  Description of Artificial Sequence: Synthetic antibody
CNRFSGSKSGNTASLTISVLQAEDEADYYCCSYAGSRYVVFGG

SEQ ID NO: 1706 - DNA, 129 bp, Artificial Sequence
  Description of Artificial Sequence: Synthetic antibody
tctaatcgcttctctggctccaagtctggcaactcggcctccctgactatctctgggctccaggctgaggacgaggctgattattactgctgctcatatgcaggtagtagatatgtggtattcggcgga

SEQ ID NO: 1707 - protein, 43 aa, Artificial Sequence
  Description of Artificial Sequence: Synthetic antibody
SNRFSGSKSGNSASLTISGLQAEDEADYYCCSYAGSRYVVFGG

SEQ ID NO: 1708 - DNA, 129 bp, Artificial Sequence
  Description of Artificial Sequence: Synthetic antibody
tctaatcgcttctctggctccaagtctggcaacacggcctccctgacaatctctgggctccaggctgaggacgaggctgattattactgctgctcatatgcaggtagtagatatgtggtattcggcgga

SEQ ID NO: 1709 - protein, 43 aa, Artificial Sequence
  Description of Artificial Sequence: Synthetic antibody
SNRFSGSKSGNTASLTISGLQAEDEADYYCCSYAGSRYVVFGG

SEQ ID NO: 1710 - DNA, 129 bp, Artificial Sequence
  Description of Artificial Sequence: Synthetic antibody
tctaatcgcttctctggctccaagtctggcaacacagccaccctgacaatctctgggctccaggctgaggacgaggctgattattactgctgctcatatgcaggtagtagatatgtggtattcggcgga

SEQ ID NO: 1711 - protein, 43 aa, Artificial Sequence
  Description of Artificial Sequence: Synthetic antibody
SNRFSGSKSGNTATLTISGLQAEDEADYYCCSYAGSRYVVFGG

SEQ ID NO: 1712 - DNA, 129 bp, Artificial Sequence
  Description of Artificial Sequence: Synthetic antibody
ctaatccgcttctctggctccaagtctggcaacacggcctccctgacaatctctgggctccaggctgaggacgaggctgattattactgctgctcatatgcaggtagtagatatgtggtattcggcgga

SEQ ID NO: 1713 - protein, 43 aa, Artificial Sequence
  Description of Artificial Sequence: Synthetic antibody
LIRFSGSKSGNTASLTISGLQAEDEADYYCCSYAGSRYVVFGG

SEQ ID NO: 1714 - protein, 12 aa, Artificial Sequence
  Description of Artificial Sequence: Synthetic antibody
CSYAGSYTFGVF

SEQ ID NO: 1715 - DNA, 129 bp, Artificial Sequence
  Description of Artificial Sequence: Synthetic antibody
gttcgcttctctggctccaagtctggcaacacggcctccctgtccatctctgggctccaggctgaggatgaggctgattattactgctgctcatatgcaggcagctacactttcggggtcttcggaact

SEQ ID NO: 1716 - protein, 43 aa, Artificial Sequence
  Description of Artificial Sequence: Synthetic antibody
VRFSGSKSGNTASLSISGLQAEDEADYYCCSYAGSYTFGVFGT

SEQ ID NO: 1717 - DNA, 129 bp, Artificial Sequence
  Description of Artificial Sequence: Synthetic antibody
gttcgcttctctggctccaagtctggcaacacggcctccctgaccatctctgggctccaggctgaggatgaggctgattattactgctgctcatatgcaggcagctacactttcggtgtcttcggaact

SEQ ID NO: 1718 - protein, 43 aa, Artificial Sequence
  Description of Artificial Sequence: Synthetic antibody
VRFSGSKSGNTASLTISGLQAEDEADYYCCSYAGSYTFGVFGT

SEQ ID NO: 1719 - DNA, 129 bp, Artificial Sequence
  Description of Artificial Sequence: Synthetic antibody
gatcgcttctctggctccaagtctggcaacacggcctccctgaccatctctgggctccaggctgaggatgaggctgattattactgctgctcatatgcaggcagctacactttcggggtcttcggaact

SEQ ID NO: 1720 - protein, 43 aa, Artificial Sequence
  Description of Artificial Sequence: Synthetic antibody
DRFSGSKSGNTASLTISGLQAEDEADYYCCSYAGSYTFGVFGT

SEQ ID NO: 1721 - DNA, 129 bp, Artificial Sequence
  Description of Artificial Sequence: Synthetic antibody
gatcgcttctctggctccaaggcaggcaacacggcctccctgaccatctctgggctccaggctgaggatgaggctgattattactgctgctcatatgcaggcagctacactttcggggtcttcggaact

SEQ ID NO: 1722 - protein, 43 aa, Artificial Sequence
  Description of Artificial Sequence: Synthetic antibody
DRFSGSKAGNTASLTISGLQAEDEADYYCCSYAGSYTFGVFGT

SEQ ID NO: 1723 - DNA, 129 bp, Artificial Sequence
  Description of Artificial Sequence: Synthetic antibody
atccgcttctctggctccaagtctggcaacacggcctccctgaccatctctgggctccaggctgaggatgaggctgattattactgctgctcatatgcaggcagctacactttcggggtcttcggaact

SEQ ID NO: 1724 - protein, 43 aa, Artificial Sequence
  Description of Artificial Sequence: Synthetic antibody
IRFSGSKSGNTASLTISGLQAEDEADYYCCSYAGSYTFGVFGT

SEQ ID NO: 1725 - protein, 11 aa, Artificial Sequence
  Description of Artificial Sequence: Synthetic antibody
CSYAGSRGVVF

SEQ ID NO: 1726 - DNA, 129 bp, Artificial Sequence
  Description of Artificial Sequence: Synthetic antibody
tcttatcgcttctctggctccaagtctggcaacacggcctccctgacaatctctgggctccaggctgaggacgaggctgattattactgctgctcatatgcaggtagtaggggggttgtattcggcgga

SEQ ID NO: 1727 - protein, 43 aa, Artificial Sequence
  Description of Artificial Sequence: Synthetic antibody
SYRFSGSKSGNTASLTISGLQAEDEADYYCCSYAGSRGVVFGG

SEQ ID NO: 1728 - DNA, 129 bp, Artificial Sequence
  Description of Artificial Sequence: Synthetic antibody
tctattcgcttctctggctccaagtctggcatcacggcctccctgacaatctctgggctccaggctgaggacgaggctgattattactgctgctcatatgcaggtagtaggggggtggtattcggcgga

SEQ ID NO: 1729 - protein, 43 aa, Artificial Sequence
  Description of Artificial Sequence: Synthetic antibody
SIRFSGSKSGITASLTISGLQAEDEADYYCCSYAGSRGVVFGG

SEQ ID NO: 1730 - DNA, 129 bp, Artificial Sequence
  Description of Artificial Sequence: Synthetic antibody
tctaatcgcttctctggctccttgtctggcaacacggcctccctgacaatctctgggctccaggctgaggacgaggctgattattactgctgctcatatgcaggtagtaggggggtggtattcggcgga

SEQ ID NO: 1731 - protein, 43 aa, Artificial Sequence
  Description of Artificial Sequence: Synthetic antibody
SNRFSGSLSGNTASLTISGLQAEDEADYYCCSYAGSRGVVFGG

SEQ ID NO: 1732 - DNA, 129 bp, Artificial Sequence
  Description of Artificial Sequence: Synthetic antibody
tctaatcgcttctctggctccaagtctggcaactcggcctccctgactatctctgggctccaggctgaggacgaggctgattattactgctgctcatatgcaggtagtaggggggtggtattcggcgga

SEQ ID NO: 1733 - protein, 43 aa, Artificial Sequence
  Description of Artificial Sequence: Synthetic antibody
SNRFSGSKSGNSASLTISGLQAEDEADYYCCSYAGSRGVVFGG

SEQ ID NO: 1734 - DNA, 129 bp, Artificial Sequence
  Description of Artificial Sequence: Synthetic antibody
tctaatcgcttctctggctccaagtctggcaacacggcctccctgacaatctctgggctccaggctgaggacgaggctgattattactgctgctcatatgcaggtagtaggggggtggtattcggcgga

SEQ ID NO: 1735 - protein, 43 aa, Artificial Sequence
  Description of Artificial Sequence: Synthetic antibody
SNRFSGSKSGNTASLTISGLQAEDEADYYCCSYAGSRGVVFGG

SEQ ID NO: 1736 - protein, 13 aa, Artificial Sequence
  Description of Artificial Sequence: Synthetic antibody
CSYAGSYTFGVVF

SEQ ID NO: 1737 - DNA, 129 bp, Artificial Sequence
  Description of Artificial Sequence: Synthetic antibody
cgcttctctggctcgaagtctggcaacacggcctccctgaccatctctgtgctccaggctgaggatgaggctgattattactgctgctcatatgcaggcagctacactttcggtgtggtattcggcgga

SEQ ID NO: 1738 - protein, 43 aa, Artificial Sequence
  Description of Artificial Sequence: Synthetic antibody
RFSGSKSGNTASLTISVLQAEDEADYYCCSYAGSYTFGVVFGG

SEQ ID NO: 1739 - DNA, 129 bp, Artificial Sequence
  Description of Artificial Sequence: Synthetic antibody
cgcttctctggctccaagtctggcaactcggcctccctgaccttctctgggctccaggctgaggatgaggctgattattactgctgctcatatgcaggcagctacactttcggtgtggtattcggcgga

SEQ ID NO: 1740 - protein, 43 aa, Artificial Sequence
  Description of Artificial Sequence: Synthetic antibody
RFSGSKSGNSASLTFSGLQAEDEADYYCCSYAGSYTFGVVFGG

SEQ ID NO: 1741 - DNA, 129 bp, Artificial Sequence
  Description of Artificial Sequence: Synthetic antibody
cgcttctctggctccaagtctggcaacacggcctccctgaccatctctgggctccaggctgaggatgaggctgattattactgctgctcatatgcaggcagctacactttcggtgtggtattcggcgga

SEQ ID NO: 1742 - protein, 43 aa, Artificial Sequence
  Description of Artificial Sequence: Synthetic antibody
RFSGSKSGNTASLTISGLQAEDEADYYCCSYAGSYTFGVVFGG

SEQ ID NO: 1743 - DNA, 129 bp, Artificial Sequence
  Description of Artificial Sequence: Synthetic antibody
tcgcttctctggctccaagtctggcaacacggcctccctgaccatctctgggctcaggctgaggatgaggctgattattactgctgctcatatgcaggcagctacactttcggtgtggtattcggcgga

SEQ ID NO: 1744 - protein, 43 aa, Artificial Sequence
  Description of Artificial Sequence: Synthetic antibody
SLLWLQVWQHGLPDHLWAQAEDEADYYCCSYAGSYTFGVVFGG

SEQ ID NO: 1745 - DNA, 129 bp, Artificial Sequence
  Description of Artificial Sequence: Synthetic antibody
tcgcttctctggctccaagtctggcaacacggcctccctgaccatctctggctccaggctgaggatgaggctgattattactgctgctcatatgcaggcagctacactttcggtgtggtattcggcgga

SEQ ID NO: 1746 - protein, 43 aa, Artificial Sequence
  Description of Artificial Sequence: Synthetic antibody
SLLWLQVWQHGLPDHLWLQAEDEADYYCCSYAGSYTFGVVFGG

SEQ ID NO: 1747 - protein, 12 aa, Artificial Sequence
  Description of Artificial Sequence: Synthetic antibody
CSYAGRYSFTIF

SEQ ID NO: 1748 - DNA, 129 bp, Artificial Sequence
  Description of Artificial Sequence: Synthetic antibody
gatcgcttatctggctccaagtctggctacacggcctccctgaccatctctggactcgaggctgaggatgaggctgattattattgctgctcatatgcaggcaggtacagtttcactatcttcggaact

SEQ ID NO: 1749 - protein, 43 aa, Artificial Sequence
  Description of Artificial Sequence: Synthetic antibody
DRLSGSKSGYTASLTISGLEAEDEADYYCCSYAGRYSFTIFGT

SEQ ID NO: 1750 - DNA, 129 bp, Artificial Sequence
  Description of Artificial Sequence: Synthetic antibody
gatcgcttatctggctccaagtctggcaactcggcctcgctgaccatctctggactccaggctgaggatgaggctgattattattgctgctcatatgcaggcaggtacagtttcactatcttcggaact

SEQ ID NO: 1751 - protein, 43 aa, Artificial Sequence
  Description of Artificial Sequence: Synthetic antibody
DRLSGSKSGNSASLTISGLQAEDEADYYCCSYAGRYSFTIFGT

SEQ ID NO: 1752 - DNA, 129 bp, Artificial Sequence
  Description of Artificial Sequence: Synthetic antibody
gatcgcttatctggctccaagtctggcaacacggcctccctgaccatctctggactcctggctgaggatgaggctgattattattgctgctcatatgcaggcaggtacagtttcactatcttcggatct

SEQ ID NO: 1753 - protein, 43 aa, Artificial Sequence
  Description of Artificial Sequence: Synthetic antibody
DRLSGSKSGNTASLTISGLLAEDEADYYCCSYAGRYSFTIFGS

SEQ ID NO: 1754 - DNA, 129 bp, Artificial Sequence
  Description of Artificial Sequence: Synthetic antibody
gatcgcttatctggctccaagtctggcaacacggcctccctgaccatctctggactccaggctgaggatgaggctgattattattgctgctcatatgcaggcaggtacagtttcactatcttcggaact

SEQ ID NO: 1755 - protein, 43 aa, Artificial Sequence
  Description of Artificial Sequence: Synthetic antibody
DRLSGSKSGNTASLTISGLQAEDEADYYCCSYAGRYSFTIFGT

SEQ ID NO: 1756 - DNA, 129 bp, Artificial Sequence
  Description of Artificial Sequence: Synthetic antibody
gatcgcttatctggctccaagtctcgcaacacggcctccctgaccatctctggactccagtctgaggatgaggctgattattattgctgctcatatgcaggcaggtacagtttcactatcttcggaact

SEQ ID NO: 1757 - protein, 43 aa, Artificial Sequence
  Description of Artificial Sequence: Synthetic antibody
DRLSGSKSRNTASLTISGLQSEDEADYYCCSYAGRYSFTIFGT

SEQ ID NO: 1758 - DNA, 129 bp, Artificial Sequence
  Description of Artificial Sequence: Synthetic antibody
tgtaatcgcttctctggctccaagtctggcaacacggcctccctgagaatctctgggctccaggctgaggacgaggctgattattactgctgctcatatgcaggtagtagcactaaggtcttcggaact

SEQ ID NO: 1759 - protein, 43 aa, Artificial Sequence
  Description of Artificial Sequence: Synthetic antibody
CNRFSGSKSGNTASLRISGLQAEDEADYYCCSYAGSSTKVFGT

SEQ ID NO: 1760 - DNA, 129 bp, Artificial Sequence
  Description of Artificial Sequence: Synthetic antibody
tctaatcgcttctctggctccaagtctggctacacggcctccctgactatctctgggctccaggctgaggacgaggctgattattactgctgctcatatgcaggtagtagcactaaggtcttcggaact

SEQ ID NO: 1761 - protein, 43 aa, Artificial Sequence
  Description of Artificial Sequence: Synthetic antibody
SNRFSGSKSGYTASLTISGLQAEDEADYYCCSYAGSSTKVFGT

SEQ ID NO: 1762 - DNA, 129 bp, Artificial Sequence
  Description of Artificial Sequence: Synthetic antibody
tctaatcgcttctctggctccaagtctggcatctcggcctccctgacaatctctgggctccaggctgaggacgaggctgattattactgctgctcatatgcaggtagtagcactaaggtcttcggaact

SEQ ID NO: 1763 - protein, 43 aa, Artificial Sequence
  Description of Artificial Sequence: Synthetic antibody
SNRFSGSKSGISASLTISGLQAEDEADYYCCSYAGSSTKVFGT

SEQ ID NO: 1764 - DNA, 129 bp, Artificial Sequence
  Description of Artificial Sequence: Synthetic antibody
tctaatcgcttctctggctccaagtctggcaagacggcctccctgactatctctgggctccaggctgaggacgaggctgattattactgctgctcatatgcaggtagtagcactaaggtcttcggaact

SEQ ID NO: 1765 - protein, 43 aa, Artificial Sequence
  Description of Artificial Sequence: Synthetic antibody
SNRFSGSKSGKTASLTISGLQAEDEADYYCCSYAGSSTKVFGT

SEQ ID NO: 1766 - DNA, 129 bp, Artificial Sequence
  Description of Artificial Sequence: Synthetic antibody
tctaatcgcttctctggctccaagtctggcaacacggcctccctgacaatctctgggctccaggctgaggacgaggctgattattactgctgctcatatgcaggtagtagcactaaggtcttcggaact

SEQ ID NO: 1767 - protein, 43 aa, Artificial Sequence
  Description of Artificial Sequence: Synthetic antibody
SNRFSGSKSGNTASLTISGLQAEDEADYYCCSYAGSSTKVFGT

SEQ ID NO: 1768 - DNA, 129 bp, Artificial Sequence
  Description of Artificial Sequence: Synthetic antibody
gatcgcttctctggctccaagtctggcatctcggcctccctgaccatctctgggctccaggctgaggatgaggctgattattactgctgctcatatgcaggcagctacactttcgttgtcttcggaact

SEQ ID NO: 1769 - protein, 43 aa, Artificial Sequence
  Description of Artificial Sequence: Synthetic antibody
DRFSGSKSGISASLTISGLQAEDEADYYCCSYAGSYTFVVFGT

SEQ ID NO: 1770 - DNA, 129 bp, Artificial Sequence
  Description of Artificial Sequence: Synthetic antibody
gatcgcttctctggctccaagtctggcaacacggcctccctgaccatctctgggctccaggctgaggatgaggctgattattactgctgctcatatgcaggcagctacactttcgttgtcttcggaact

SEQ ID NO: 1771 - protein, 43 aa, Artificial Sequence
  Description of Artificial Sequence: Synthetic antibody
DRFSGSKSGNTASLTISGLQAEDEADYYCCSYAGSYTFVVFGT

SEQ ID NO: 1772 - DNA, 129 bp, Artificial Sequence
  Description of Artificial Sequence: Synthetic antibody
ttccgcttctctggctccaagtctggcaacacggcctccctgaccatctctgggctccaggctgaggatgaggctgattattactgctgctcatatgcaggcagctacactttcgttgtcttcggaact

SEQ ID NO: 1773 - protein, 43 aa, Artificial Sequence
  Description of Artificial Sequence: Synthetic antibody
FRFSGSKSGNTASLTISGLQAEDEADYYCCSYAGSYTFVVFGT

SEQ ID NO: 1774 - DNA, 129 bp, Artificial Sequence
  Description of Artificial Sequence: Synthetic antibody
atccgcttctctggctccaagtctggcaacacggcctccctgaccatctctgggctccaggctgaggatgaggctgattattactgctgctcatatgcaggcagctacactttcgttgtcttcggaact

SEQ ID NO: 1775 - protein, 43 aa, Artificial Sequence
  Description of Artificial Sequence: Synthetic antibody
IRFSGSKSGNTASLTISGLQAEDEADYYCCSYAGSYTFVVFGT

SEQ ID NO: 1776 - DNA, 129 bp, Artificial Sequence
  Description of Artificial Sequence: Synthetic antibody
atacgcttctctggctccaagtctggcaacacggcctccctgaccatctctgggctccaggctgaggatgaggctgattattactgctgctcatatgcaggcagctacactttcgttgtcttcggaact

SEQ ID NO: 1777 - DNA, 129 bp, Artificial Sequence
  Description of Artificial Sequence: Synthetic antibody
ggggtccctgatcgcttctctgtctccaagtctggcatcacggcctccctgaccatctctgggctccaggctgaggatgaggctgattattactgctgctcatatgcaggcagcgtggtattcggcgga

SEQ ID NO: 1778 - protein, 43 aa, Artificial Sequence
  Description of Artificial Sequence: Synthetic antibody
GVPDRFSVSKSGITASLTISGLQAEDEADYYCCSYAGSVVFGG

SEQ ID NO: 1779 - DNA, 129 bp, Artificial Sequence
  Description of Artificial Sequence: Synthetic antibody
ggggtccctgatcgcttctctggctccaagtctggcatcacggcctccctgaccatctctgtgctccaggctgaggatgaggctgattattactgctgctcatatgcaggcagcgtggtattcggcgga

SEQ ID NO: 1780 - protein, 43 aa, Artificial Sequence
  Description of Artificial Sequence: Synthetic antibody
GVPDRFSGSKSGITASLTISVLQAEDEADYYCCSYAGSVVFGG

SEQ ID NO: 1781 - DNA, 129 bp, Artificial Sequence
  Description of Artificial Sequence: Synthetic antibody
ggggtccctgatcgcttctctggctccaagtctggcaacacggcctccctgaccatctctgggctccaggctgaggatgaggctgattattactgctgctcatatgcaggcagcgtggtattcggcgga

SEQ ID NO: 1782 - protein, 43 aa, Artificial Sequence
  Description of Artificial Sequence: Synthetic antibody
GVPDRFSGSKSGNTASLTISGLQAEDEADYYCCSYAGSVVFGG

SEQ ID NO: 1783 - DNA, 129 bp, Artificial Sequence
  Description of Artificial Sequence: Synthetic antibody
ggggtccctgatcgcttctctggctccaagtctggcaacacggcctccctgaccatctctgggctccaggctgaggatgaggctgattattactgctgctcatacgcaggcagcgtggtattcgccgga

SEQ ID NO: 1784 - protein, 43 aa, Artificial Sequence
  Description of Artificial Sequence: Synthetic antibody
GVPDRFSGSKSGNTASLTISGLQAEDEADYYCCSYAGSVVFAG

SEQ ID NO: 1785 - DNA, 129 bp, Artificial Sequence
  Description of Artificial Sequence: Synthetic antibody
gggggacctgatcgcttctctggctccaagtctggcaacacggcctccctgaccatctctgggctccaggctgaggatgaggctgattattactgctgctcatatgcaggcagcgtggtattcggcgga

SEQ ID NO: 1786 - protein, 43 aa, Artificial Sequence
  Description of Artificial Sequence: Synthetic antibody
GGPDRFSGSKSGNTASLTISGLQAEDEADYYCCSYAGSVVFGG

SEQ ID NO: 1787 - protein, 13 aa, Artificial Sequence
  Description of Artificial Sequence: Synthetic antibody
CSYAGSYTFLFVF

SEQ ID NO: 1788 - DNA, 129 bp, Artificial Sequence
  Description of Artificial Sequence: Synthetic antibody
cgcttctctggctccaagtctggcaacacggcctccctgaccatctctgggctccaggctgaggatgaggctgattattactgctgctcatatgcaggcagctacactttcctttttgtcttcggaact

SEQ ID NO: 1789 - protein, 43 aa, Artificial Sequence
  Description of Artificial Sequence: Synthetic antibody
RFSGSKSGNTASLTISGLQAEDEADYYCCSYAGSYTFLFVFGT

SEQ ID NO: 1790 - DNA, 129 bp, Artificial Sequence
  Description of Artificial Sequence: Synthetic antibody
cgcttctctggctccaagtctggcaacaaggcctccctgaccatctctgtgctccaggctgaggatgaggctgattattactgctgctcatatgcaggcagctacactttcctttttgtcttcggaact

SEQ ID NO: 1791 - protein, 43 aa, Artificial Sequence
  Description of Artificial Sequence: Synthetic antibody
RFSGSKSGNKASLTISVLQAEDEADYYCCSYAGSYTFLFVFGT

SEQ ID NO: 1792 - DNA, 129 bp, Artificial Sequence
  Description of Artificial Sequence: Synthetic antibody
tcgcttctctggctccaagtctggcaacacggcctcctgaccatctctgggctccaggctgaggatgaggctgattattactgctgctcatatgcaggcagctacactttcctttttgtcttcggaact

SEQ ID NO: 1793 - protein, 43 aa, Artificial Sequence
  Description of Artificial Sequence: Synthetic antibody
SLLWLQVWQHGLLTISGLQAEDEADYYCCSYAGSYTFLFVFGT

SEQ ID NO: 1794 - DNA, 129 bp, Artificial Sequence
  Description of Artificial Sequence: Synthetic antibody
tcgcttctctggctccaagtctggcaacacggcctccctgaccatctctgggctcaggctgaggatgaggctgattattactgctgctcatatgcaggcagctacactttcctttttgtcttcggaact

SEQ ID NO: 1795 - protein, 43 aa, Artificial Sequence
  Description of Artificial Sequence: Synthetic antibody
SLLWLQVWQHGLPDHLWAQAEDEADYYCCSYAGSYTFLFVFGT

SEQ ID NO: 1796 - DNA, 129 bp, Artificial Sequence
  Description of Artificial Sequence: Synthetic antibody
tcgcttctctggctccaagtctggcaacacggcctccctgaccatctctggctccaggctgaggatgaggctgattattactgctgctcatatgcaggcagctacactttcctttttgtcttcggaact

SEQ ID NO: 1797 - protein, 43 aa, Artificial Sequence
  Description of Artificial Sequence: Synthetic antibody
SLLWLQVWQHGLPDHLWLQAEDEADYYCCSYAGSYTFLFVFGT

SEQ ID NO: 1798 - protein, 12 aa, Artificial Sequence
  Description of Artificial Sequence: Synthetic antibody
CSYAGSYTLVVF

SEQ ID NO: 1799 - DNA, 129 bp, Artificial Sequence
  Description of Artificial Sequence: Synthetic antibody
gatcgcttctctggctccaagtctggctacacggcctcccagaccatctctgggctccaggctgaggatgaggctgattattactgctgctcatatgcaggcagctacactcttgtggtattcggcgga

SEQ ID NO: 1800 - protein, 43 aa, Artificial Sequence
  Description of Artificial Sequence: Synthetic antibody
DRFSGSKSGYTASQTISGLQAEDEADYYCCSYAGSYTLVVFGG

SEQ ID NO: 1801 - DNA, 129 bp, Artificial Sequence
  Description of Artificial Sequence: Synthetic antibody
gatcgcttctctggctccaagtctggcatcacggcctccctgtccatctctgggctccaggctgaggatgaggctgattattactgctgctcatatgcaggcagctacactcttgtggtattcggcgga

SEQ ID NO: 1802 - protein, 43 aa, Artificial Sequence
  Description of Artificial Sequence: Synthetic antibody
DRFSGSKSGITASLSISGLQAEDEADYYCCSYAGSYTLVVFGG

SEQ ID NO: 1803 - DNA, 129 bp, Artificial Sequence
  Description of Artificial Sequence: Synthetic antibody
gatcgcttctctggctccaagtctggcaacacggcctccctgaccatctctgggctccaggctgaggatgaggctgattattactgctgctcatatgcaggcagctacactcttgtggtattcggcgga

SEQ ID NO: 1804 - protein, 43 aa, Artificial Sequence
  Description of Artificial Sequence: Synthetic antibody
DRFSGSKSGNTASLTISGLQAEDEADYYCCSYAGSYTLVVFGG

SEQ ID NO: 1805 - DNA, 129 bp, Artificial Sequence
  Description of Artificial Sequence: Synthetic antibody
gatcgcttctctggctccaagtctggcaacacggcctccctgaccatcactgggctccaggctgaggatgaggctgattattaccgctgctcatatgcaggcagctacactcttgtggtattcggcgga

SEQ ID NO: 1806 - protein, 43 aa, Artificial Sequence
  Description of Artificial Sequence: Synthetic antibody
DRFSGSKSGNTASLTITGLQAEDEADYYRCSYAGSYTLVVFGG

SEQ ID NO: 1807 - DNA, 129 bp, Artificial Sequence
  Description of Artificial Sequence: Synthetic antibody
atccgcttctctggctccaagtctggcaacacggcctccctgaccatctctgggctccaggctgaggatgaggctgattattactgctgctcatatgcaggcagctacactcttgtggtattcggcgga

SEQ ID NO: 1808 - protein, 43 aa, Artificial Sequence
  Description of Artificial Sequence: Synthetic antibody
IRFSGSKSGNTASLTISGLQAEDEADYYCCSYAGSYTLVVFGG

SEQ ID NO: 1809 - protein, 12 aa, Artificial Sequence
  Description of Artificial Sequence: Synthetic antibody
CSYAGSSTSSVF

SEQ ID NO: 1810 - DNA, 129 bp, Artificial Sequence
  Description of Artificial Sequence: Synthetic antibody
aatcgcttctctgtctccaagtctggcaacacggcctccctgactatctctgggctccaggctgaggacgaggctgattattactgctgctcatatgcaggtagtagcacttccagtgtcttcggaact

SEQ ID NO: 1811 - protein, 43 aa, Artificial Sequence
  Description of Artificial Sequence: Synthetic antibody
NRFSVSKSGNTASLTISGLQAEDEADYYCCSYAGSSTSSVFGT

SEQ ID NO: 1812 - DNA, 129 bp, Artificial Sequence
  Description of Artificial Sequence: Synthetic antibody
aatcgcttctctggctccaagtcttgcaacacggcctccctgtcaatctctgggctccaggctgaggacgaggctgattattactgctgctcatatgcaggtagtagcacttccagtgtcttcggaact

SEQ ID NO: 1813 - protein, 43 aa, Artificial Sequence
  Description of Artificial Sequence: Synthetic antibody
NRFSGSKSCNTASLSISGLQAEDEADYYCCSYAGSSTSSVFGT

SEQ ID NO: 1814 - DNA, 129 bp, Artificial Sequence
  Description of Artificial Sequence: Synthetic antibody
aatcgcttctctggctccaagtctggcaacacggcctccctgacaatctctgggctccaggctggggacgaggctgattattactgctgctcatatgcaggtagtagcacttccagtgtcttcggacct

SEQ ID NO: 1815 - protein, 43 aa, Artificial Sequence
  Description of Artificial Sequence: Synthetic antibody
NRFSGSKSGNTASLTISGLQAGDEADYYCCSYAGSSTSSVFGP

SEQ ID NO: 1816 - DNA, 129 bp, Artificial Sequence
  Description of Artificial Sequence: Synthetic antibody
aatcgcttctctggctccaagtctggcaacacggcctccctgacaatctctgggctccaggctgaggacgaggctgattattactgctgctcatatgcaggtagtagcacttccagtgtcttcggaact

SEQ ID NO: 1817 - protein, 43 aa, Artificial Sequence
  Description of Artificial Sequence: Synthetic antibody
NRFSGSKSGNTASLTISGLQAEDEADYYCCSYAGSSTSSVFGT

SEQ ID NO: 1818 - DNA, 129 bp, Artificial Sequence
  Description of Artificial Sequence: Synthetic antibody
atccgcttctctggctccaagtctggcaacacggcctccctgacaatctctgggctccaggctgaggacgaggctgattattactgctgctcatatgcaggtagtagcacttccagtgtcttcggaact

SEQ ID NO: 1819 - protein, 43 aa, Artificial Sequence
  Description of Artificial Sequence: Synthetic antibody
IRFSGSKSGNTASLTISGLQAEDEADYYCCSYAGSSTSSVFGT

SEQ ID NO: 1820 - protein, 12 aa, Artificial Sequence
  Description of Artificial Sequence: Synthetic antibody
CSYAGTTTPFVF

SEQ ID NO: 1821 - DNA, 129 bp, Artificial Sequence
  Description of Artificial Sequence: Synthetic antibody
tatcgcttctctggctcccagtctggcatcacggcctccctgacaatctctggtctccaggctgaggacgaggctgattattactgctgctcatatgcaggcactaccactccttttgtcttcggaact

SEQ ID NO: 1822 - protein, 43 aa, Artificial Sequence
  Description of Artificial Sequence: Synthetic antibody
YRFSGSQSGITASLTISGLQAEDEADYYCCSYAGTTTPFVFGT

SEQ ID NO: 1823 - DNA, 129 bp, Artificial Sequence
  Description of Artificial Sequence: Synthetic antibody
tatcgcttctctggctcccagtctggcaacacggcctccctgacaatctcttgtctccaggctgaggacgaggctgattattactgctgctcatatgcaggcactaccactccttttgtcttcggaact

SEQ ID NO: 1824 - protein, 43 aa, Artificial Sequence
  Description of Artificial Sequence: Synthetic antibody
YRFSGSQSGNTASLTISCLQAEDEADYYCCSYAGTTTPFVFGT

SEQ ID NO: 1825 - DNA, 129 bp, Artificial Sequence
  Description of Artificial Sequence: Synthetic antibody
actcgcttctctggctcccagtctggcatcacggcctccctgacaatctctggtctccaggctgaggacgaggctgattattactgctgctcatatgcaggcactaccactccttttgtcttcggaact

SEQ ID NO: 1826 - protein, 43 aa, Artificial Sequence
  Description of Artificial Sequence: Synthetic antibody
TRFSGSQSGITASLTISGLQAEDEADYYCCSYAGTTTPFVFGT

SEQ ID NO: 1827 - DNA, 129 bp, Artificial Sequence
  Description of Artificial Sequence: Synthetic antibody
aatcgcttctctggctcccagtctggcaacacggcctccctgacaatctctggtctccaggctgaggacgaggctgattattactgctgctcatatgcaggcactaccactccttttgtcttcggaact

SEQ ID NO: 1828 - protein, 43 aa, Artificial Sequence
  Description of Artificial Sequence: Synthetic antibody
NRFSGSQSGNTASLTISGLQAEDEADYYCCSYAGTTTPFVFGT

SEQ ID NO: 1829 - DNA, 129 bp, Artificial Sequence
  Description of Artificial Sequence: Synthetic antibody
aatcgattctctggctcccagtctggcaacacggcatccctgacaatctctggtctccaggctgaggacgaggctgattattactgctgctcatatgcaggcactaccactccttttgtcttcggaact

SEQ ID NO: 1830 - protein, 12 aa, Artificial Sequence
  Description of Artificial Sequence: Synthetic antibody
CSYAGSYTSYVF

SEQ ID NO: 1831 - DNA, 129 bp, Artificial Sequence
  Description of Artificial Sequence: Synthetic antibody
gatcgcttctctggctgcaagtctggcatcacggcctccctgaccatctctgggctccaggctgaggatgaggctgattattactgctgctcatatgcaggcagctacacctcttatgtcttcggaact

SEQ ID NO: 1832 - protein, 43 aa, Artificial Sequence
  Description of Artificial Sequence: Synthetic antibody
DRFSGCKSGITASLTISGLQAEDEADYYCCSYAGSYTSYVFGT

SEQ ID NO: 1833 - DNA, 129 bp, Artificial Sequence
  Description of Artificial Sequence: Synthetic antibody
gatcgcttctctggctccaagtcttgcaacacggcctccctgaccatctctgggctccaggctgatgatgaggctgattattactgctgctcatatgcaggcagctacacctcttatgtcttcggaact

SEQ ID NO: 1834 - protein, 43 aa, Artificial Sequence
  Description of Artificial Sequence: Synthetic antibody
DRFSGSKSCNTASLTISGLQADDEADYYCCSYAGSYTSYVFGT

SEQ ID NO: 1835 - DNA, 129 bp, Artificial Sequence
  Description of Artificial Sequence: Synthetic antibody
gatcgcttctctggctccaagtctggcatcacggcctccctgtccatctctgggctccaggctgaggatgaggctgattattactgctgctcatatgcaggcagctacacctcttatgtcttcggaact

SEQ ID NO: 1836 - protein, 43 aa, Artificial Sequence
  Description of Artificial Sequence: Synthetic antibody
DRFSGSKSGITASLSISGLQAEDEADYYCCSYAGSYTSYVFGT

SEQ ID NO: 1837 - DNA, 129 bp, Artificial Sequence
  Description of Artificial Sequence: Synthetic antibody
gatcgcttctctggctccaagtctggcaacacggcctccctgaccatctctgggctccaggctgaggatgaggctgattattactgctgctcatatgcaggcagctacacctcttatgtcttcggaact

SEQ ID NO: 1838 - protein, 43 aa, Artificial Sequence
  Description of Artificial Sequence: Synthetic antibody
DRFSGSKSGNTASLTISGLQAEDEADYYCCSYAGSYTSYVFGT

SEQ ID NO: 1839 - DNA, 129 bp, Artificial Sequence
  Description of Artificial Sequence: Synthetic antibody
gatcgcttctctggctccaagtctggcaacacggcctccctgaccatctctgggctccaggctgaggatgaggctgattattactgctgctcatatgcaggcagctacacctcctatgtcttcggcact

SEQ ID NO: 1840 - protein, 11 aa, Artificial Sequence
  Description of Artificial Sequence: Synthetic antibody
CSYAGSSAVVF

SEQ ID NO: 1841 - DNA, 129 bp, Artificial Sequence
  Description of Artificial Sequence: Synthetic antibody
tctaatcgcttctctggctgcaagtctggcaactcggcctccctgacaatctctgggctccaggctgaggacgaggctgattattactgctgctcatatgcaggtagtagcgctgtggtattcggcgga

SEQ ID NO: 1842 - protein, 43 aa, Artificial Sequence
  Description of Artificial Sequence: Synthetic antibody
SNRFSGCKSGNSASLTISGLQAEDEADYYCCSYAGSSAVVFGG

SEQ ID NO: 1843 - DNA, 129 bp, Artificial Sequence
  Description of Artificial Sequence: Synthetic antibody
tctaatcgcttctctggctccatgtctggcaacacggcctccctgacaatctctcggctccaggctgaggacgaggctgattattactgctgctcatatgcaggtagtagcgctgtggtattcggcgga

SEQ ID NO: 1844 - protein, 43 aa, Artificial Sequence
  Description of Artificial Sequence: Synthetic antibody
SNRFSGSMSGNTASLTISRLQAEDEADYYCCSYAGSSAVVFGG

SEQ ID NO: 1845 - DNA, 129 bp, Artificial Sequence
  Description of Artificial Sequence: Synthetic antibody
tctaatcgcttctctggctccaagtctggcaacacggcctccctgacaatctctgggctccaggctgaggacgaggctgattattactgctgctcatatgcaggtagtagcgctgtggtattcggcgga

SEQ ID NO: 1846 - protein, 43 aa, Artificial Sequence
  Description of Artificial Sequence: Synthetic antibody
SNRFSGSKSGNTASLTISGLQAEDEADYYCCSYAGSSAVVFGG

SEQ ID NO: 1847 - DNA, 129 bp, Artificial Sequence
  Description of Artificial Sequence: Synthetic antibody
tctaatcgcttctctggctccaagtctggcaacacggcctccctgacaatctctgggctccaggctgaggacgaggccgattattactgctgctcgtatgcaggtagtagcgctgtggtattcggcgga

SEQ ID NO: 1848 - DNA, 129 bp, Artificial Sequence
  Description of Artificial Sequence: Synthetic antibody
ctaatccgcttctctggctccaagtctggcaacacggcctccctgacaatctctgggctccaggctgaggacgaggctgattattactgctgctcatatgcaggtagtagcgctgtggtattcggcgga

SEQ ID NO: 1849 - protein, 43 aa, Artificial Sequence
  Description of Artificial Sequence: Synthetic antibody
LIRFSGSKSGNTASLTISGLQAEDEADYYCCSYAGSSAVVFGG

SEQ ID NO: 1850 - protein, 11 aa, Artificial Sequence
  Description of Artificial Sequence: Synthetic antibody
CSYTGSYTLVF

SEQ ID NO: 1851 - DNA, 129 bp, Artificial Sequence
  Description of Artificial Sequence: Synthetic antibody
ctgatccgcttctctggctccaagtctggcaacacggcctccctgaccatctctgggctccaggctgaggatgaggctgattattactgctgctcatatacaggcagctacactttggtattcggcgga

SEQ ID NO: 1852 - protein, 43 aa, Artificial Sequence
  Description of Artificial Sequence: Synthetic antibody
LIRFSGSKSGNTASLTISGLQAEDEADYYCCSYTGSYTLVFGG

SEQ ID NO: 1853 - DNA, 129 bp, Artificial Sequence
  Description of Artificial Sequence: Synthetic antibody
cgtgatcgcttctctggctccaagtcttgcaacacggcctccctgaccatctctgggctccaggctgaggatgaggctgattattactgctgctcatatacaggcagctacactttggtattcggcgga

SEQ ID NO: 1854 - protein, 43 aa, Artificial Sequence
  Description of Artificial Sequence: Synthetic antibody
RDRFSGSKSCNTASLTISGLQAEDEADYYCCSYTGSYTLVFGG

SEQ ID NO: 1855 - DNA, 129 bp, Artificial Sequence
  Description of Artificial Sequence: Synthetic antibody
cctgatcgcttctctggctcgaagtctggcaacacggcctccctgaccatctctgggctcctggctgaggatgaggctgattattactgctgctcatatacaggcagctacactttggtattcggcgga

SEQ ID NO: 1856 - protein, 43 aa, Artificial Sequence
  Description of Artificial Sequence: Synthetic antibody
PDRFSGSKSGNTASLTISGLLAEDEADYYCCSYTGSYTLVFGG

SEQ ID NO: 1857 - DNA, 129 bp, Artificial Sequence
  Description of Artificial Sequence: Synthetic antibody
cctgatcgcttctctggctccaagtctggcaacacggcctccctgaccatctctgtgctccaggctgaggatgaggctgattattactgctgctcatatacaggcagctacaccttggtattcggcgga

SEQ ID NO: 1858 - protein, 43 aa, Artificial Sequence
  Description of Artificial Sequence: Synthetic antibody
PDRFSGSKSGNTASLTISVLQAEDEADYYCCSYTGSYTLVFGG

SEQ ID NO: 1859 - DNA, 129 bp, Artificial Sequence
  Description of Artificial Sequence: Synthetic antibody
cctgatcgcttctctggctccaagtctggcaacacggcctccctgaccatctctgggctccaggctgaggatgaggctgattattactgctgctcatatacaggcagctacactttggtattcggcgga

SEQ ID NO: 1860 - protein, 43 aa, Artificial Sequence
  Description of Artificial Sequence: Synthetic antibody
PDRFSGSKSGNTASLTISGLQAEDEADYYCCSYTGSYTLVFGG

SEQ ID NO: 1861 - DNA, 129 bp, Artificial Sequence
  Description of Artificial Sequence: Synthetic antibody
gtttcttatagcttctctggctccaagtctggcaacacggcctccctgacaatctctgggctccaggctgaggacgaggctgattattactgctgctcatatgcaggtagtctttatgtcttcggaact

SEQ ID NO: 1862 - protein, 43 aa, Artificial Sequence
  Description of Artificial Sequence: Synthetic antibody
VSYSFSGSKSGNTASLTISGLQAEDEADYYCCSYAGSLYVFGT

SEQ ID NO: 1863 - DNA, 129 bp, Artificial Sequence
  Description of Artificial Sequence: Synthetic antibody
gtttctactcgcttctctggctccaagtctggcaacacggcctccctgacaatctctgtgctccaggctgaggacgaggctgattattactgctgctcatatgcaggtagtctttatgtcttcggaact

SEQ ID NO: 1864 - protein, 43 aa, Artificial Sequence
  Description of Artificial Sequence: Synthetic antibody
VSTRFSGSKSGNTASLTISVLQAEDEADYYCCSYAGSLYVFGT

SEQ ID NO: 1865 - DNA, 129 bp, Artificial Sequence
  Description of Artificial Sequence: Synthetic antibody
gtttctaatcgcttctctggctccaagtcttgcaacacggcctccctgactatctctgggctccaggctgaggacgaggctgattattactgctgctcatatgcaggtagtctttatgtcttcggaact

SEQ ID NO: 1866 - protein, 43 aa, Artificial Sequence
  Description of Artificial Sequence: Synthetic antibody
VSNRFSGSKSCNTASLTISGLQAEDEADYYCCSYAGSLYVFGT

SEQ ID NO: 1867 - DNA, 129 bp, Artificial Sequence
  Description of Artificial Sequence: Synthetic antibody
gtttctaatcgcttctctggctccaagtctggcaacacggcctccctgacaatctctgggctccaggctgaggacgaggctgattattactgctgctcatatgcaggtagtctttatgtcttcggaact

SEQ ID NO: 1868 - protein, 43 aa, Artificial Sequence
  Description of Artificial Sequence: Synthetic antibody
VSNRFSGSKSGNTASLTISGLQAEDEADYYCCSYAGSLYVFGT

SEQ ID NO: 1869 - DNA, 129 bp, Artificial Sequence
  Description of Artificial Sequence: Synthetic antibody
gttctaatccgcttctctggctccaagtctggcaacacggcctccctgacaatctctgggctccaggctgaggacgaggctgattattactgctgctcatatgcaggtagtctttatgtcttcggaact

SEQ ID NO: 1870 - protein, 43 aa, Artificial Sequence
  Description of Artificial Sequence: Synthetic antibody
VLIRFSGSKSGNTASLTISGLQAEDEADYYCCSYAGSLYVFGT

SEQ ID NO: 1871 - protein, 9 aa, Artificial Sequence
  Description of Artificial Sequence: Synthetic antibody
CSYAGSYVF

SEQ ID NO: 1872 - DNA, 129 bp, Artificial Sequence
  Description of Artificial Sequence: Synthetic antibody
gggtccctgatccgcttctctggctccaagtctggcaacacggcctccctgaccatctctgggctccaggctgaggatgaggctgattattactgctgctcatatgcaggcagctacgtattcggcgga

SEQ ID NO: 1873 - protein, 43 aa, Artificial Sequence
  Description of Artificial Sequence: Synthetic antibody
GSLIRFSGSKSGNTASLTISGLQAEDEADYYCCSYAGSYVFGG

SEQ ID NO: 1874 - DNA, 129 bp, Artificial Sequence
  Description of Artificial Sequence: Synthetic antibody
ggggtccctgatcgcttctctggctccaagtctggcatcacggcctccctgaccatctctgtgctccaggctgaggatgaggctgattattactgctgctcatatgcaggcagctacgtattcggcgga

SEQ ID NO: 1875 - protein, 43 aa, Artificial Sequence
  Description of Artificial Sequence: Synthetic antibody
GVPDRFSGSKSGITASLTISVLQAEDEADYYCCSYAGSYVFGG

SEQ ID NO: 1876 - DNA, 129 bp, Artificial Sequence
  Description of Artificial Sequence: Synthetic antibody
ggggtccctgatcgcttctctggctccaagtctggcaacacggcctccctgaccatctctgggctcgaggctgaggatgaggctgattattactgctgctcatatgcaggcagctacgtattcggcggt

SEQ ID NO: 1877 - protein, 43 aa, Artificial Sequence
  Description of Artificial Sequence: Synthetic antibody
GVPDRFSGSKSGNTASLTISGLEAEDEADYYCCSYAGSYVFGG

SEQ ID NO: 1878 - DNA, 129 bp, Artificial Sequence
  Description of Artificial Sequence: Synthetic antibody
ggggtccctgatcgcttctctggctccaagtctggcaacacggcctccctgaccatctctgggctccaggctgaggatgaggctgattattactgctgctcatatgcaggcagctacgtattcggcgga

SEQ ID NO: 1879 - protein, 43 aa, Artificial Sequence
  Description of Artificial Sequence: Synthetic antibody
GVPDRFSGSKSGNTASLTISGLQAEDEADYYCCSYAGSYVFGG

SEQ ID NO: 1880 - DNA, 129 bp, Artificial Sequence
  Description of Artificial Sequence: Synthetic antibody
ggggtccctgatcgcttctctggctccaagtccggcaacacggcctccctgaccatctctgggctccaggctgaggatgaggctgattattactgctgctcatatgcgggcagctacgtattcggcgga

SEQ ID NO: 1881 - protein, 12 aa, Artificial Sequence
  Description of Artificial Sequence: Synthetic antibody
CSYAGSYTFYVF

SEQ ID NO: 1882 - DNA, 129 bp, Artificial Sequence
  Description of Artificial Sequence: Synthetic antibody
gatcgcttctctggctccaagtctggctacacggcctccctgaccatctctgggctccaggctgaggatgaggctgattatttctgctgctcatatgcaggcagctacactttttatgtcttcggaact

SEQ ID NO: 1883 - protein, 43 aa, Artificial Sequence
  Description of Artificial Sequence: Synthetic antibody
DRFSGSKSGYTASLTISGLQAEDEADYFCCSYAGSYTFYVFGT

SEQ ID NO: 1884 - DNA, 129 bp, Artificial Sequence
  Description of Artificial Sequence: Synthetic antibody
gatcgcttctctggctccaagtctggcaacacggcctccctgaccatctctgggctccaggctgaggatgaggctgattattactgctgctcatatgcaggcagctacactttttatgtcttcggaact

SEQ ID NO: 1885 - protein, 43 aa, Artificial Sequence
  Description of Artificial Sequence: Synthetic antibody
DRFSGSKSGNTASLTISGLQAEDEADYYCCSYAGSYTFYVFGT

SEQ ID NO: 1886 - DNA, 129 bp, Artificial Sequence
  Description of Artificial Sequence: Synthetic antibody
gatcgcttctctggctccaagtctgacaacacggcctccctgaccatctctgggctccaggctgaggatgaggctgattattactgctgctcatatgcaggcagctacaccttttatgtcttcggaact

SEQ ID NO: 1887 - protein, 43 aa, Artificial Sequence
  Description of Artificial Sequence: Synthetic antibody
DRFSGSKSDNTASLTISGLQAEDEADYYCCSYAGSYTFYVFGT

SEQ ID NO: 1888 - DNA, 129 bp, Artificial Sequence
  Description of Artificial Sequence: Synthetic antibody
atccgcttctctggctccaagtctggcaacacggcctccctgaccatctctgggctccaggctgaggatgaggctgattattactgctgctcatatgcaggcagctacactttttatgtcttcggaact

SEQ ID NO: 1889 - protein, 43 aa, Artificial Sequence
  Description of Artificial Sequence: Synthetic antibody
IRFSGSKSGNTASLTISGLQAEDEADYYCCSYAGSYTFYVFGT

SEQ ID NO: 1890 - DNA, 129 bp, Artificial Sequence
  Description of Artificial Sequence: Synthetic antibody
atacgcttctctggctccaagtctggcaacacggcctccctgaccatctctgggctccaggctgaggatgaggctgattattactgctgctcatatgcaggcagctacactttttatgtcttcggaact

SEQ ID NO: 1891 - protein, 11 aa, Artificial Sequence
  Description of Artificial Sequence: Synthetic antibody
CSYAGTYTWVF

SEQ ID NO: 1892 - DNA, 129 bp, Artificial Sequence
  Description of Artificial Sequence: Synthetic antibody
ctgattcgcttctctggctccaagtctggcaacacggcctccctgaccctctctgggctccaggctgaggatgaggctgattattactgctgctcatatgcaggcacctacacttgggtgttcggcgga

SEQ ID NO: 1893 - protein, 43 aa, Artificial Sequence
  Description of Artificial Sequence: Synthetic antibody
LIRFSGSKSGNTASLTLSGLQAEDEADYYCCSYAGTYTWVFGG

SEQ ID NO: 1894 - DNA, 129 bp, Artificial Sequence
  Description of Artificial Sequence: Synthetic antibody
ctgatccgcttctctggctccaagtctggcaacacggcctccctgaccctctctgggctccaggctgaggatgaggctgattattactgctgctcatatgcaggcacctacacttgggtgttcggcgga

SEQ ID NO: 1895 - DNA, 129 bp, Artificial Sequence
  Description of Artificial Sequence: Synthetic antibody
cctgatcgcttctctggctccaagtctggctacacggcctccctgacgctctctgggctccaggctgaggatgaggctgattattactgctgctcatatgcaggcacctacacttgggtgttcggcgga

SEQ ID NO: 1896 - protein, 43 aa, Artificial Sequence
  Description of Artificial Sequence: Synthetic antibody
PDRFSGSKSGYTASLTLSGLQAEDEADYYCCSYAGTYTWVFGG

SEQ ID NO: 1897 - DNA, 129 bp, Artificial Sequence
  Description of Artificial Sequence: Synthetic antibody
cctgatcgcttctctggctccaagtctggcaacacggcctcccttaccctctctgggctccaggctgaggatgaggatgattattactgctgctcatatgcaggcacctacacttgggtgttcggcgga

SEQ ID NO: 1898 - protein, 43 aa, Artificial Sequence
  Description of Artificial Sequence: Synthetic antibody
PDRFSGSKSGNTASLTLSGLQAEDEDDYYCCSYAGTYTWVFGG

SEQ ID NO: 1899 - DNA, 129 bp, Artificial Sequence
  Description of Artificial Sequence: Synthetic antibody
cctgatcgcttctctggctccaagtctggcaacacggcctccctgaccctctctgggctccaggctgaggatgaggctgattattactgctgctcatatgcaggcacctacacttgggtgttcggcgga

SEQ ID NO: 1900 - protein, 43 aa, Artificial Sequence
  Description of Artificial Sequence: Synthetic antibody
PDRFSGSKSGNTASLTLSGLQAEDEADYYCCSYAGTYTWVFGG

SEQ ID NO: 1901 - protein, 12 aa, Artificial Sequence
  Description of Artificial Sequence: Synthetic antibody
CSYAGSSTLVVF

SEQ ID NO: 1902 - DNA, 129 bp, Artificial Sequence
  Description of Artificial Sequence: Synthetic antibody
tttcgcttctctggctccaagtctggcaacacggcctccctgacaatctctgggctccaggctgaggacgaggctgattattactgctgctcatatgcaggtagtagcactttagtggtattcggcgga

SEQ ID NO: 1903 - protein, 43 aa, Artificial Sequence
  Description of Artificial Sequence: Synthetic antibody
FRFSGSKSGNTASLTISGLQAEDEADYYCCSYAGSSTLVVFGG

SEQ ID NO: 1904 - DNA, 129 bp, Artificial Sequence
  Description of Artificial Sequence: Synthetic antibody
aatcgcttctctggctccaagtctggcttcacggcctccctgacaatctctgggctccaggctgaggacgaggctgattattactgctgctcatatgcaggtagtagcactttggtggtattcggcgga

SEQ ID NO: 1905 - protein, 43 aa, Artificial Sequence
  Description of Artificial Sequence: Synthetic antibody
NRFSGSKSGFTASLTISGLQAEDEADYYCCSYAGSSTLVVFGG

SEQ ID NO: 1906 - DNA, 129 bp, Artificial Sequence
  Description of Artificial Sequence: Synthetic antibody
aatcgcttctctggctccaagtctggcaacacggcctccctgacaatctctgggctccaggctgaggacgaggctgattattactgctgctcatatgcaggtagtagcactttggtggtattcggcgga

SEQ ID NO: 1907 - protein, 43 aa, Artificial Sequence
  Description of Artificial Sequence: Synthetic antibody
NRFSGSKSGNTASLTISGLQAEDEADYYCCSYAGSSTLVVFGG

SEQ ID NO: 1908 - DNA, 129 bp, Artificial Sequence
  Description of Artificial Sequence: Synthetic antibody
aatcgcttctctggctccaagtctggcaacacggcctccctgacaatctctgggctccaggctgaggacgaggctgattattactgctgctcatatgcaggtagtagcactttagtggtattcggcgga

SEQ ID NO: 1909 - DNA, 129 bp, Artificial Sequence
  Description of Artificial Sequence: Synthetic antibody
atccgcttctctggctccaagtctggcaacacggcctccctgacaatctctgggctccaggctgaggacgaggctgattattactgctgctcatatgcaggtagtagcactttggtggtattcggcgga

SEQ ID NO: 1910 - protein, 43 aa, Artificial Sequence
  Description of Artificial Sequence: Synthetic antibody
IRFSGSKSGNTASLTISGLQAEDEADYYCCSYAGSSTLVVFGG

SEQ ID NO: 1911 - protein, 13 aa, Artificial Sequence
  Description of Artificial Sequence: Synthetic antibody
CSYAGSYTFGSVF

SEQ ID NO: 1912 - DNA, 129 bp, Artificial Sequence
  Description of Artificial Sequence: Synthetic antibody
cgcttctctggctccaagtctggcaacacggcctccctgaccatctctgggctccaggctgagtatgaggctgattattactgctgctcatatgcaggcagctacactttcggtagtgtcttcgtaact

SEQ ID NO: 1913 - protein, 43 aa, Artificial Sequence
  Description of Artificial Sequence: Synthetic antibody
RFSGSKSGNTASLTISGLQAEYEADYYCCSYAGSYTFGSVFVT

SEQ ID NO: 1914 - DNA, 129 bp, Artificial Sequence
  Description of Artificial Sequence: Synthetic antibody
cgcttctctggctccaagtctggcaacacggcctccctgaccatctctgggctccaggctgaggatgaggctgattattactgctgctcatatgcaggcagctacactttcggtagtgtcttcggaact

SEQ ID NO: 1915 - protein, 43 aa, Artificial Sequence
  Description of Artificial Sequence: Synthetic antibody
RFSGSKSGNTASLTISGLQAEDEADYYCCSYAGSYTFGSVFGT

SEQ ID NO: 1916 - DNA, 129 bp, Artificial Sequence
  Description of Artificial Sequence: Synthetic antibody
agcttctctggctccaagtctggcatcacggcctccctgaccatctctgggctccaggctgaggatgaggctgattattactgctgctcatatgcaggcagctacactttcggtagtgtcttcggaact

SEQ ID NO: 1917 - protein, 43 aa, Artificial Sequence
  Description of Artificial Sequence: Synthetic antibody
SFSGSKSGITASLTISGLQAEDEADYYCCSYAGSYTFGSVFGT

SEQ ID NO: 1918 - DNA, 129 bp, Artificial Sequence
  Description of Artificial Sequence: Synthetic antibody
tcgcttctctggctccaagtctggcaacacggcctcctgaccatctctgggctccaggctgaggatgaggctgattattactgctgctcatatgcaggcagctacactttcggtagtgtcttcggaact

SEQ ID NO: 1919 - protein, 43 aa, Artificial Sequence
  Description of Artificial Sequence: Synthetic antibody
SLLWLQVWQHGLLTISGLQAEDEADYYCCSYAGSYTFGSVFGT

SEQ ID NO: 1920 - protein, 11 aa, Artificial Sequence
  Description of Artificial Sequence: Synthetic antibody
CSYSGRYTYVF

SEQ ID NO: 1921 - DNA, 129 bp, Artificial Sequence
  Description of Artificial Sequence: Synthetic antibody
cctgttcgcttctctggctccaagtctggcaacacggcctccctgaccatctctgggctcctggctgaagatgaggctgattatttctgctgctcatattcaggcaggtacacttatgtcttcggaact

SEQ ID NO: 1922 - protein, 43 aa, Artificial Sequence
  Description of Artificial Sequence: Synthetic antibody
PVRFSGSKSGNTASLTISGLLAEDEADYFCCSYSGRYTYVFGT

SEQ ID NO: 1923 - DNA, 129 bp, Artificial Sequence
  Description of Artificial Sequence: Synthetic antibody
cctgatcgcttctctggctccaagtctggcaacacggcctccctggccatctctgggctccaggctgaagatgaggctgattatttctgctgctcgtattcaggcaggtacacttatgtcttcggaact

SEQ ID NO: 1924 - protein, 43 aa, Artificial Sequence
  Description of Artificial Sequence: Synthetic antibody
PDRFSGSKSGNTASLAISGLQAEDEADYFCCSYSGRYTYVFGT

SEQ ID NO: 1925 - DNA, 129 bp, Artificial Sequence
  Description of Artificial Sequence: Synthetic antibody
cctgatcgcttctctggctccaagtctggcaacacggcctccctgaccatctctgggctccaggctgaagatgaggctgattatttctgctgctcatattcaggcaggtacacttatgtcttcggaact

SEQ ID NO: 1926 - protein, 43 aa, Artificial Sequence
  Description of Artificial Sequence: Synthetic antibody
PDRFSGSKSGNTASLTISGLQAEDEADYFCCSYSGRYTYVFGT

SEQ ID NO: 1927 - DNA, 129 bp, Artificial Sequence
  Description of Artificial Sequence: Synthetic antibody
cctgatcgcttctctggctacaagtctgtcaacacggcctccctgaccatctctgggctccaggctgaagatgaggctgattatttctgctgctcatattcaggcaggtacacttatgtcttcggaact

SEQ ID NO: 1928 - protein, 43 aa, Artificial Sequence
  Description of Artificial Sequence: Synthetic antibody
PDRFSGYKSVNTASLTISGLQAEDEADYFCCSYSGRYTYVFGT

SEQ ID NO: 1929 - protein, 11 aa, Artificial Sequence
  Description of Artificial Sequence: Synthetic antibody
CSYAGSRTFVF

SEQ ID NO: 1930 - DNA, 129 bp, Artificial Sequence
  Description of Artificial Sequence: Synthetic antibody
tctaatcgcttctctggctccaagtctggcatctcggcctccctgacaatctctgggctccaggctgaggacgaggctgattattactgctgctcatatgcaggtagtagaacttttgtcttcggaact

SEQ ID NO: 1931 - protein, 43 aa, Artificial Sequence
  Description of Artificial Sequence: Synthetic antibody
SNRFSGSKSGISASLTISGLQAEDEADYYCCSYAGSRTFVFGT

SEQ ID NO: 1932 - DNA, 129 bp, Artificial Sequence
  Description of Artificial Sequence: Synthetic antibody
tctaatcgcttctctggctccaagtctggcaacacggcctccctgacaatctctgggctccaggctgaggacgaggttgattattactgctgctcatatgcaggcagtagaacttttgtcttcggaact

SEQ ID NO: 1933 - protein, 43 aa, Artificial Sequence
  Description of Artificial Sequence: Synthetic antibody
SNRFSGSKSGNTASLTISGLQAEDEVDYYCCSYAGSRTFVFGT

SEQ ID NO: 1934 - DNA, 129 bp, Artificial Sequence
  Description of Artificial Sequence: Synthetic antibody
tctaatcgcttctctggctccaagtctggcaacacggcctccctgacaatctctgggctccaggctgaggacgaggctgattattactgctgctcatatgcaggtagtagaacttttgtcttcggaact

SEQ ID NO: 1935 - protein, 43 aa, Artificial Sequence
  Description of Artificial Sequence: Synthetic antibody
SNRFSGSKSGNTASLTISGLQAEDEADYYCCSYAGSRTFVFGT

SEQ ID NO: 1936 - DNA, 129 bp, Artificial Sequence
  Description of Artificial Sequence: Synthetic antibody
ctaatccgcttctctggctccaagtctggcaacacggcctccctgacaatctctgggctccaggctgaggacgaggctgattattactgctgctcatatgcaggtagtagaacttttgtcttcggaact

SEQ ID NO: 1937 - protein, 43 aa, Artificial Sequence
  Description of Artificial Sequence: Synthetic antibody
LIRFSGSKSGNTASLTISGLQAEDEADYYCCSYAGSRTFVFGT

SEQ ID NO: 1938 - protein, 12 aa, Artificial Sequence
  Description of Artificial Sequence: Synthetic antibody
CSYAGSSTYYVF

SEQ ID NO: 1939 - DNA, 129 bp, Artificial Sequence
  Description of Artificial Sequence: Synthetic antibody
aatcgcttctctggctccaagtctggcgacacggtctccctgacaatctctgggctccaggctgaggacgaggctgattattactgctgctcatatgcaggtagtagcacctattatgtcttcggaact

SEQ ID NO: 1940 - protein, 43 aa, Artificial Sequence
  Description of Artificial Sequence: Synthetic antibody
NRFSGSKSGDTVSLTISGLQAEDEADYYCCSYAGSSTYYVFGT

SEQ ID NO: 1941 - DNA, 129 bp, Artificial Sequence
  Description of Artificial Sequence: Synthetic antibody
aatcgcttctctggctccaagtctggcaagactgcctccctgacaatctctgggctccaggctgaggacgaggctgattattactgctgctcatatgcaggtagtagcacctattatgtcttcggaact

SEQ ID NO: 1942 - protein, 43 aa, Artificial Sequence
  Description of Artificial Sequence: Synthetic antibody
NRFSGSKSGKTASLTISGLQAEDEADYYCCSYAGSSTYYVFGT

SEQ ID NO: 1943 - DNA, 129 bp, Artificial Sequence
  Description of Artificial Sequence: Synthetic antibody
aatcgcttctctggctccaagtctggcaacacggcctccctgacaatctctgggctccaggctgaggacgaggctgattattactgctgctcatatgcaggtagtagcacctattatgtcttcggaact

SEQ ID NO: 1944 - protein, 43 aa, Artificial Sequence
  Description of Artificial Sequence: Synthetic antibody
NRFSGSKSGNTASLTISGLQAEDEADYYCCSYAGSSTYYVFGT

SEQ ID NO: 1945 - DNA, 129 bp, Artificial Sequence
  Description of Artificial Sequence: Synthetic antibody
atccgcttctctggctccaagtctggcaacacggcctccctgacaatctctgggctccaggctgaggacgaggctgattattactgctgctcatatgcaggtagtagcacctattatgtcttcggaact

SEQ ID NO: 1946 - protein, 43 aa, Artificial Sequence
  Description of Artificial Sequence: Synthetic antibody
IRFSGSKSGNTASLTISGLQAEDEADYYCCSYAGSSTYYVFGT

SEQ ID NO: 1947 - protein, 11 aa, Artificial Sequence
  Description of Artificial Sequence: Synthetic antibody
CSYAGSSTVLF

SEQ ID NO: 1948 - DNA, 129 bp, Artificial Sequence
  Description of Artificial Sequence: Synthetic antibody
tctaatcgcttctctggctccaagtctggcaactcggcctccctgactatctctgggctccaggctgaggacgaggctgattattactgctgctcatatgcaggtagtagcactgtgctattcggcgga

SEQ ID NO: 1949 - protein, 43 aa, Artificial Sequence
  Description of Artificial Sequence: Synthetic antibody
SNRFSGSKSGNSASLTISGLQAEDEADYYCCSYAGSSTVLFGG

SEQ ID NO: 1950 - DNA, 129 bp, Artificial Sequence
  Description of Artificial Sequence: Synthetic antibody
tctaatcgcttctctggctccaagtctggcaacacggcctccctgacaatctctgggctccaggctgagggcgaggctgattattactgctgctcatatgcaggtagtagcactgtgctattcggcgga

SEQ ID NO: 1951 - protein, 43 aa, Artificial Sequence
  Description of Artificial Sequence: Synthetic antibody
SNRFSGSKSGNTASLTISGLQAEGEADYYCCSYAGSSTVLFGG

SEQ ID NO: 1952 - DNA, 129 bp, Artificial Sequence
  Description of Artificial Sequence: Synthetic antibody
tctaatcgcttctctggctccaagtctggcaacacggcctccctgacaatctctgggctccaggctgaggacgaggctgattattactgctgctcatatgcaggtagtagcactgtgctattcggcgga

SEQ ID NO: 1953 - protein, 43 aa, Artificial Sequence
  Description of Artificial Sequence: Synthetic antibody
SNRFSGSKSGNTASLTISGLQAEDEADYYCCSYAGSSTVLFGG

SEQ ID NO: 1954 - DNA, 129 bp, Artificial Sequence
  Description of Artificial Sequence: Synthetic antibody
tctaatcgcttctctggctccaagtctggcaacacggcctccctgacaatctctgggctccaggctgaggacgaggctgattattactgctgctcatatgcaggtagtagcactgtgctattcggcgca

SEQ ID NO: 1955 - protein, 43 aa, Artificial Sequence
  Description of Artificial Sequence: Synthetic antibody
SNRFSGSKSGNTASLTISGLQAEDEADYYCCSYAGSSTVLFGA

SEQ ID NO: 1956 - protein, 11 aa, Artificial Sequence
  Description of Artificial Sequence: Synthetic antibody
CSYAGSYTLLF

SEQ ID NO: 1957 - DNA, 129 bp, Artificial Sequence
  Description of Artificial Sequence: Synthetic antibody
ctgatccgcttctctggctccaagtctggcaacacggcctccctgaccatctctgggctccgggctgaggatgaggctgattattactgctgctcatatgcaggcagctacactctgctattcggcgga

SEQ ID NO: 1958 - protein, 43 aa, Artificial Sequence
  Description of Artificial Sequence: Synthetic antibody
LIRFSGSKSGNTASLTISGLRAEDEADYYCCSYAGSYTLLFGG

SEQ ID NO: 1959 - DNA, 129 bp, Artificial Sequence
  Description of Artificial Sequence: Synthetic antibody
cctgatcgcttctctggctccatgtctggcaacacggcctccctgaccttctctgggctccgggctgaggatgaggctgattattactgctgctcatatgcaggcagctacactctgctattcggcgga

SEQ ID NO: 1960 - protein, 43 aa, Artificial Sequence
  Description of Artificial Sequence: Synthetic antibody
PDRFSGSMSGNTASLTFSGLRAEDEADYYCCSYAGSYTLLFGG

SEQ ID NO: 1961 - DNA, 129 bp, Artificial Sequence
  Description of Artificial Sequence: Synthetic antibody
cctgatcgcttctctggctccaagtctggcaacacggcctccctgaccatctctggtctccgggctgaggatgagtctgattattactgctgctcatatgcaggcagctacactctgctattcggcgga

SEQ ID NO: 1962 - protein, 43 aa, Artificial Sequence
  Description of Artificial Sequence: Synthetic antibody
PDRFSGSKSGNTASLTISGLRAEDESDYYCCSYAGSYTLLFGG

SEQ ID NO: 1963 - DNA, 129 bp, Artificial Sequence
  Description of Artificial Sequence: Synthetic antibody
cctgatcgcttctctggctccaagtctggcaacacggcctccctgaccatctctgggctccgggctgaggatgaggctgattattactgctgctcatatgcaggcagctacactctgctattcggcgga

SEQ ID NO: 1964 - protein, 43 aa, Artificial Sequence
  Description of Artificial Sequence: Synthetic antibody
PDRFSGSKSGNTASLTISGLRAEDEADYYCCSYAGSYTLLFGG

SEQ ID NO: 1965 - protein, 11 aa, Artificial Sequence
  Description of Artificial Sequence: Synthetic antibody
CSYAGSSTLEF

SEQ ID NO: 1966 - DNA, 129 bp, Artificial Sequence
  Description of Artificial Sequence: Synthetic antibody
ttctatcgcttctctggctccaagtctggcaacacggcctccctgacaatctctgggctccaggctgaggacgaggctgattattactgctgctcatatgcaggtagtagcactttagagttcggcgga

SEQ ID NO: 1967 - protein, 43 aa, Artificial Sequence
  Description of Artificial Sequence: Synthetic antibody
FYRFSGSKSGNTASLTISGLQAEDEADYYCCSYAGSSTLEFGG

SEQ ID NO: 1968 - DNA, 129 bp, Artificial Sequence
  Description of Artificial Sequence: Synthetic antibody
tctaatcgcttctctggctccaagtctggcaacacggcctccctgacaatctctgggctccaggctgaggacgaggctgattattactgctgctcatatgcaggtagtagcactttagagttcggcgga

SEQ ID NO: 1969 - protein, 43 aa, Artificial Sequence
  Description of Artificial Sequence: Synthetic antibody
SNRFSGSKSGNTASLTISGLQAEDEADYYCCSYAGSSTLEFGG

SEQ ID NO: 1970 - DNA, 129 bp, Artificial Sequence
  Description of Artificial Sequence: Synthetic antibody
ctaatccgcttctctggctccaagtctggcaacacggcctccctgacaatctctgggctccaggctgaggacgaggctgattattactgctgctcatatgcaggtagtagcactttagagttcggcgga

SEQ ID NO: 1971 - protein, 43 aa, Artificial Sequence
  Description of Artificial Sequence: Synthetic antibody
LIRFSGSKSGNTASLTISGLQAEDEADYYCCSYAGSSTLEFGG

SEQ ID NO: 1972 - DNA, 129 bp, Artificial Sequence
  Description of Artificial Sequence: Synthetic antibody
ctaatacgcttctctggctccaagtctggcaacacggcctccctgacaatctctgggctccaggctgaggacgaggctgattattactgctgctcatatgcaggtagtagcactttagagttcggcgga

SEQ ID NO: 1973 - protein, 10 aa, Artificial Sequence
  Description of Artificial Sequence: Synthetic antibody
CSYAGGSVVF

SEQ ID NO: 1974 - DNA, 129 bp, Artificial Sequence
  Description of Artificial Sequence: Synthetic antibody
tttcttatccgcttctctggctccaagtctggcaacacagcctccctgacaatctctgggatccaggctgaggacgaggctgattattattgttgttcatatgcaggtggtagcgtggtattcggcgga

SEQ ID NO: 1975 - protein, 43 aa, Artificial Sequence
  Description of Artificial Sequence: Synthetic antibody
FLIRFSGSKSGNTASLTISGIQAEDEADYYCCSYAGGSVVFGG

SEQ ID NO: 1976 - DNA, 129 bp, Artificial Sequence
  Description of Artificial Sequence: Synthetic antibody
gtttcttatcgcttctctggctccaagtctggcaacacagcctgcctgacaatctctgggatccaggctgaggacgaggctgattattattgttgttcatatgcaggtggtagcgtggtattcggcgga

SEQ ID NO: 1977 - protein, 43 aa, Artificial Sequence
  Description of Artificial Sequence: Synthetic antibody
VSYRFSGSKSGNTACLTISGIQAEDEADYYCCSYAGGSVVFGG

SEQ ID NO: 1978 - DNA, 129 bp, Artificial Sequence
  Description of Artificial Sequence: Synthetic antibody
gtttctaatcgcttctctggctccaagtctggcaacacagcctccctgacaatctcttggatgcaggctgaggacgaggctgattattattgttgttcatatgcaggtggtagcgtggtattcggcgga

SEQ ID NO: 1979 - protein, 43 aa, Artificial Sequence
  Description of Artificial Sequence: Synthetic antibody
VSNRFSGSKSGNTASLTISWMQAEDEADYYCCSYAGGSVVFGG

SEQ ID NO: 1980 - DNA, 129 bp, Artificial Sequence
  Description of Artificial Sequence: Synthetic antibody
gtttctaatcgcttctctggctccaagtctggcaacacagcctccctgacaatctctgggatccaggctgaggacgaggctgattattattgttgttcatatgcaggtggtagcgtggtattcggcgga

SEQ ID NO: 1981 - protein, 43 aa, Artificial Sequence
  Description of Artificial Sequence: Synthetic antibody
VSNRFSGSKSGNTASLTISGIQAEDEADYYCCSYAGGSVVFGG

SEQ ID NO: 1982 - protein, 12 aa, Artificial Sequence
  Description of Artificial Sequence: Synthetic antibody
CSYADSSTFYVF

SEQ ID NO: 1983 - DNA, 129 bp, Artificial Sequence
  Description of Artificial Sequence: Synthetic antibody
aatcgcttctctggctccatgtctggcaacacggcctccctgacaatctctgggctgcaggctgaggacgaggctgattattactgttgctcatatgcagatagtagcactttctatgtcttcggaact

SEQ ID NO: 1984 - protein, 43 aa, Artificial Sequence
  Description of Artificial Sequence: Synthetic antibody
NRFSGSMSGNTASLTISGLQAEDEADYYCCSYADSSTFYVFGT

SEQ ID NO: 1985 - DNA, 129 bp, Artificial Sequence
  Description of Artificial Sequence: Synthetic antibody
aatcgcttctctggctccaagtctgtcaacacggcctccctgacaatctctgggctccaggctgaggacgagtctgattattactgttgctcatatgcagatagtagcactttctatgtcttcggaact

SEQ ID NO: 1986 - protein, 43 aa, Artificial Sequence
  Description of Artificial Sequence: Synthetic antibody
NRFSGSKSVNTASLTISGLQAEDESDYYCCSYADSSTFYVFGT

SEQ ID NO: 1987 - DNA, 129 bp, Artificial Sequence
  Description of Artificial Sequence: Synthetic antibody
aatcgcttctctggctccaagtctggcaacacggcctccctgacaatctctgggctccaggctgaggacgaggctgattattactgttgctcatatgcagatagtagcactttctatgtcttcggaact

SEQ ID NO: 1988 - protein, 43 aa, Artificial Sequence
  Description of Artificial Sequence: Synthetic antibody
NRFSGSKSGNTASLTISGLQAEDEADYYCCSYADSSTFYVFGT

SEQ ID NO: 1989 - DNA, 129 bp, Artificial Sequence
  Description of Artificial Sequence: Synthetic antibody
atccgcttctctggctccaagtctggcaacacggcctccctgacaatctctgggctccaggctgaggacgaggctgattattactgttgctcatatgcagatagtagcactttctatgtcttcggaact

SEQ ID NO: 1990 - protein, 43 aa, Artificial Sequence
  Description of Artificial Sequence: Synthetic antibody
IRFSGSKSGNTASLTISGLQAEDEADYYCCSYADSSTFYVFGT

SEQ ID NO: 1991 - DNA, 129 bp, Artificial Sequence
  Description of Artificial Sequence: Synthetic antibody
tcttatcgcttctctggctccaagtctggcatcacggcctccctgacaatctctgggctccaggctgaggacgaggctgattattactgctgctcatatgcaggtagtagtactgtggtttttggcgga

SEQ ID NO: 1992 - protein, 43 aa, Artificial Sequence
  Description of Artificial Sequence: Synthetic antibody
SYRFSGSKSGITASLTISGLQAEDEADYYCCSYAGSSTVVFGG

SEQ ID NO: 1993 - DNA, 129 bp, Artificial Sequence
  Description of Artificial Sequence: Synthetic antibody
tctaatcgcttctctggctccaagtctggcaactcggcctccctgactatctctgggctccaggctgaggacgaggctgattattactgctgctcatatgcaggtagtagtactgtggtttttggcgga

SEQ ID NO: 1994 - protein, 43 aa, Artificial Sequence
  Description of Artificial Sequence: Synthetic antibody
SNRFSGSKSGNSASLTISGLQAEDEADYYCCSYAGSSTVVFGG

SEQ ID NO: 1995 - DNA, 129 bp, Artificial Sequence
  Description of Artificial Sequence: Synthetic antibody
tctaatcgcttctctggctccaagtctggcaacacggcctccctgacaatctctgggctccaggctgaggacgaggctgattattactgctgctcatatgcaggtagtagtactgtggtttttggcgga

SEQ ID NO: 1996 - DNA, 129 bp, Artificial Sequence
  Description of Artificial Sequence: Synthetic antibody
tctaatcgcttctctggctccaagtctggcaacacggcctccctgacaatctctgggctccaggctgaggacgaggctgattattactgctgctcatatgcaggtagtagcactgtggttttcggcggt

SEQ ID NO: 1997 - protein, 10 aa, Artificial Sequence
  Description of Artificial Sequence: Synthetic antibody
CSYAGSSIVF

SEQ ID NO: 1998 - DNA, 129 bp, Artificial Sequence
  Description of Artificial Sequence: Synthetic antibody
tttctaatccgcttctctggctccaagtctggcaacacggcctccctgacaatctctgggctccaggctgaggacgaggctgattattactgctgctcatatgcaggtagtagcatcgtattcggcgga

SEQ ID NO: 1999 - protein, 43 aa, Artificial Sequence
  Description of Artificial Sequence: Synthetic antibody
FLIRFSGSKSGNTASLTISGLQAEDEADYYCCSYAGSSIVFGG

SEQ ID NO: 2000 - DNA, 129 bp, Artificial Sequence
  Description of Artificial Sequence: Synthetic antibody
gtttcttatcgcttctctggctccaagtctggcaactcggcctccctgacaatctctgggctccaggctgaggacgaggctgattattactgctgctcatatgcaggtagtagcatcgtattcggcgga

SEQ ID NO: 2001 - protein, 43 aa, Artificial Sequence
  Description of Artificial Sequence: Synthetic antibody
VSYRFSGSKSGNSASLTISGLQAEDEADYYCCSYAGSSIVFGG

SEQ ID NO: 2002 - DNA, 129 bp, Artificial Sequence
  Description of Artificial Sequence: Synthetic antibody
gtttctaatcgcttctctggctccaagtctggcaacacggcctccctgactatctctgggctccaggctgaggtcgaggctgattattactgctgctcatatgcaggtagtagcatcgtattcggcgga

SEQ ID NO: 2003 - protein, 43 aa, Artificial Sequence
  Description of Artificial Sequence: Synthetic antibody
VSNRFSGSKSGNTASLTISGLQAEVEADYYCCSYAGSSIVFGG

SEQ ID NO: 2004 - DNA, 129 bp, Artificial Sequence
  Description of Artificial Sequence: Synthetic antibody
gtttctaatcgcttctctggctccaagtctggcaacacggcctccctgacaatctctgggctccaggctgaggacgaggctgattattactgctgctcatatgcaggtagtagcatcgtattcggcgga

SEQ ID NO: 2005 - protein, 43 aa, Artificial Sequence
  Description of Artificial Sequence: Synthetic antibody
VSNRFSGSKSGNTASLTISGLQAEDEADYYCCSYAGSSIVFGG

SEQ ID NO: 2006 - protein, 12 aa, Artificial Sequence
  Description of Artificial Sequence: Synthetic antibody
CSYAGRDTYVAF

SEQ ID NO: 2007 - DNA, 129 bp, Artificial Sequence
  Description of Artificial Sequence: Synthetic antibody
gttcggttctttggctccaagtctggcaactcggcctccctgaccttctctgggctccaggctgaggatgaagctgattattactgctgctcatatgcaggcagggacacttatgtggcattcggcgga

SEQ ID NO: 2008 - protein, 43 aa, Artificial Sequence
  Description of Artificial Sequence: Synthetic antibody
VRFFGSKSGNSASLTFSGLQAEDEADYYCCSYAGRDTYVAFGG

SEQ ID NO: 2009 - DNA, 129 bp, Artificial Sequence
  Description of Artificial Sequence: Synthetic antibody
gatcggttctttggctccaagtctggcaacacggcctccctgaccatctctgggctccaggctgaggatgaagctgattattactgctgctcatatgcaggcagggacacttatgtggcattcggcgga

SEQ ID NO: 2010 - protein, 43 aa, Artificial Sequence
  Description of Artificial Sequence: Synthetic antibody
DRFFGSKSGNTASLTISGLQAEDEADYYCCSYAGRDTYVAFGG

SEQ ID NO: 2011 - DNA, 129 bp, Artificial Sequence
  Description of Artificial Sequence: Synthetic antibody
gatcggttcgttggctccaagtctggcaacacggcctccccgaccatctctgggctccaggctgaggatgaagctgattattactgctgctcatatgcaggcagggacacttatgtggcattcggcgga

SEQ ID NO: 2012 - protein, 43 aa, Artificial Sequence
  Description of Artificial Sequence: Synthetic antibody
DRFVGSKSGNTASPTISGLQAEDEADYYCCSYAGRDTYVAFGG

SEQ ID NO: 2013 - DNA, 129 bp, Artificial Sequence
  Description of Artificial Sequence: Synthetic antibody
gatcggtcctttggctccaagtctggcaacacggcctccctgaccatctctgggctccaggctgagtatgaagctgattattactgctgctcatatgcaggcagggacacttatgtggcattcggcgga

SEQ ID NO: 2014 - protein, 43 aa, Artificial Sequence
  Description of Artificial Sequence: Synthetic antibody
DRSFGSKSGNTASLTISGLQAEYEADYYCCSYAGRDTYVAFGG

SEQ ID NO: 2015 - protein, 10 aa, Artificial Sequence
  Description of Artificial Sequence: Synthetic antibody
CSYAGSYTVF

SEQ ID NO: 2016 - DNA, 129 bp, Artificial Sequence
  Description of Artificial Sequence: Synthetic antibody
gtccctgttcgcttctctggctccaagtctggctacacggcctccctgaccatctctgggctccaggctgaggatgaggctgattattactgctgctcatatgcaggcagctacacggtattcggcgga

SEQ ID NO: 2017 - protein, 43 aa, Artificial Sequence
  Description of Artificial Sequence: Synthetic antibody
VPVRFSGSKSGYTASLTISGLQAEDEADYYCCSYAGSYTVFGG

SEQ ID NO: 2018 - DNA, 129 bp, Artificial Sequence
  Description of Artificial Sequence: Synthetic antibody
gtccctgttcgcttctctggctccaagtctggcaacacggcctccccgaccatctctgggctccaggctgaggatgaggctgattattactgctgctcatatgcaggcagctacacggtattcggcgga

SEQ ID NO: 2019 - protein, 43 aa, Artificial Sequence
  Description of Artificial Sequence: Synthetic antibody
VPVRFSGSKSGNTASPTISGLQAEDEADYYCCSYAGSYTVFGG

SEQ ID NO: 2020 - DNA, 129 bp, Artificial Sequence
  Description of Artificial Sequence: Synthetic antibody
gtccctgatcgcttctctggctccaagtctggcatcacggcctccctgaccatctcttggctccaggctgaggatgaggctgattattactgctgctcatatgcaggcagctacacggtattcggcgga

SEQ ID NO: 2021 - protein, 43 aa, Artificial Sequence
  Description of Artificial Sequence: Synthetic antibody
VPDRFSGSKSGITASLTISWLQAEDEADYYCCSYAGSYTVFGG

SEQ ID NO: 2022 - DNA, 129 bp, Artificial Sequence
  Description of Artificial Sequence: Synthetic antibody
gtccctgatcgcttctctggctccaagtctggcaacacggcctccctgaccatctctgggctccaggctgaggatgaggctgattattactgctgctcatatgcaggcagctacacggtattcggcgga

SEQ ID NO: 2023 - protein, 43 aa, Artificial Sequence
  Description of Artificial Sequence: Synthetic antibody
VPDRFSGSKSGNTASLTISGLQAEDEADYYCCSYAGSYTVFGG

SEQ ID NO: 2024 - protein, 12 aa, Artificial Sequence
  Description of Artificial Sequence: Synthetic antibody
CSYAGSYIPVVF

SEQ ID NO: 2025 - DNA, 129 bp, Artificial Sequence
  Description of Artificial Sequence: Synthetic antibody
gttcgcttctctggctccaagtctggcaactcggcctccctgaccatctctgggctccaggctgaggatgaggctgattattactgctgctcatatgcaggcagctacattcctgtggtattcggcgga

SEQ ID NO: 2026 - protein, 43 aa, Artificial Sequence
  Description of Artificial Sequence: Synthetic antibody
VRFSGSKSGNSASLTISGLQAEDEADYYCCSYAGSYIPVVFGG

SEQ ID NO: 2027 - DNA, 129 bp, Artificial Sequence
  Description of Artificial Sequence: Synthetic antibody
gatcgcttctctggctgcaagtctggcaactcggcctccctgaccatctctgggctccaggctgaggatgaggctgattattactgctgctcatatgcaggcagctacattcctgtggtattcggcgga

SEQ ID NO: 2028 - protein, 43 aa, Artificial Sequence
  Description of Artificial Sequence: Synthetic antibody
DRFSGCKSGNSASLTISGLQAEDEADYYCCSYAGSYIPVVFGG

SEQ ID NO: 2029 - DNA, 129 bp, Artificial Sequence
  Description of Artificial Sequence: Synthetic antibody
gatcgcttctctggctccaagtctggcaacacggcctccctgtccatctctgggctccaggctgaggatgaggctgattattactgctgctcatatgcaggcagctacattcctgtggtattcggcggt

SEQ ID NO: 2030 - protein, 43 aa, Artificial Sequence
  Description of Artificial Sequence: Synthetic antibody
DRFSGSKSGNTASLSISGLQAEDEADYYCCSYAGSYIPVVFGG

SEQ ID NO: 2031 - DNA, 129 bp, Artificial Sequence
  Description of Artificial Sequence: Synthetic antibody
gatcgcttctctggctccaagtctggcaacacggcctccctgaccatctctgggctccaggctgaggatgaggctgattattactgctgctcatatgcaggcagctacattcctgtggtattcggcgga

SEQ ID NO: 2032 - protein, 43 aa, Artificial Sequence
  Description of Artificial Sequence: Synthetic antibody
DRFSGSKSGNTASLTISGLQAEDEADYYCCSYAGSYIPVVFGG

SEQ ID NO: 2033 - protein, 11 aa, Artificial Sequence
  Description of Artificial Sequence: Synthetic antibody
CSYAGRYTLVF

SEQ ID NO: 2034 - DNA, 129 bp, Artificial Sequence
  Description of Artificial Sequence: Synthetic antibody
ctgatccgcttctctggctccaagtctggcaacacggcctccctgaccatctctgggctccaggctgaggatgaggctgattattactgctgctcatatgcaggcaggtacactttggtattcggcgta

SEQ ID NO: 2035 - protein, 43 aa, Artificial Sequence
  Description of Artificial Sequence: Synthetic antibody
LIRFSGSKSGNTASLTISGLQAEDEADYYCCSYAGRYTLVFGV

SEQ ID NO: 2036 - DNA, 129 bp, Artificial Sequence
  Description of Artificial Sequence: Synthetic antibody
cctgatcgcttctctggctccaagtcttgcaacacggcctccctgaccatctctgggctcgaggctgaggatgaggctgattattactgctgctcatatgcaggcaggtacactttggtattcggcgta

SEQ ID NO: 2037 - protein, 43 aa, Artificial Sequence
  Description of Artificial Sequence: Synthetic antibody
PDRFSGSKSCNTASLTISGLEAEDEADYYCCSYAGRYTLVFGV

SEQ ID NO: 2038 - DNA, 129 bp, Artificial Sequence
  Description of Artificial Sequence: Synthetic antibody
cctgatcgcttctctggctccaagtctggcaacacggcctccctgaccatctcttggctccagtctgaggatgaggctgattattactgctgctcatatgcaggcaggtacactttggtattcggcgta

SEQ ID NO: 2039 - protein, 43 aa, Artificial Sequence
  Description of Artificial Sequence: Synthetic antibody
PDRFSGSKSGNTASLTISWLQSEDEADYYCCSYAGRYTLVFGV

SEQ ID NO: 2040 - DNA, 129 bp, Artificial Sequence
  Description of Artificial Sequence: Synthetic antibody
cctgatcgcttctctggctccaagtctggcaacacggcctccctgaccatctctgggctccaggctgaggatgaggctgattattactgctgctcatatgcaggcaggtacactttggtattcggcgta

SEQ ID NO: 2041 - protein, 43 aa, Artificial Sequence
  Description of Artificial Sequence: Synthetic antibody
PDRFSGSKSGNTASLTISGLQAEDEADYYCCSYAGRYTLVFGV

SEQ ID NO: 2042 - protein, 11 aa, Artificial Sequence
  Description of Artificial Sequence: Synthetic antibody
CSYAGSSTFLF

SEQ ID NO: 2043 - DNA, 129 bp, Artificial Sequence
  Description of Artificial Sequence: Synthetic antibody
tcttttcgcttctctggctccaagtctggcaacacggcctccctgacaatctctgggctccaggctgaggacgaggctgattattactgctgctcatatgcaggtagtagcacttttttattcggcgga

SEQ ID NO: 2044 - protein, 43 aa, Artificial Sequence
  Description of Artificial Sequence: Synthetic antibody
SFRFSGSKSGNTASLTISGLQAEDEADYYCCSYAGSSTFLFGG

SEQ ID NO: 2045 - DNA, 129 bp, Artificial Sequence
  Description of Artificial Sequence: Synthetic antibody
tctaatcgcttctctggctccaagtctggcaacacggcctccctgacaatctctgggctccaggctgaggacgaggctgattattactgctgctcatatgcaggtagtagcacttttttattcggcgga

SEQ ID NO: 2046 - protein, 43 aa, Artificial Sequence
  Description of Artificial Sequence: Synthetic antibody
SNRFSGSKSGNTASLTISGLQAEDEADYYCCSYAGSSTFLFGG

SEQ ID NO: 2047 - DNA, 129 bp, Artificial Sequence
  Description of Artificial Sequence: Synthetic antibody
tctaatcgcttctctggctccaagtctggcaacacggcctccctgacaatctctgggctccaggctgaggacgaggctgattattactgctgctcatatgcaggtagtagcactttcctattcggcgga

SEQ ID NO: 2048 - DNA, 129 bp, Artificial Sequence
  Description of Artificial Sequence: Synthetic antibody
tctaatcgattctctggctccaagtctggcaacactgcctccctgacaatctctgggctccaggctgaggacgaggctgattattactgctgctcatatgcaggtagtagcacttttttattcggcgga

SEQ ID NO: 2049 - protein, 12 aa, Artificial Sequence
  Description of Artificial Sequence: Synthetic antibody
CSYAGSSTSVLF

SEQ ID NO: 2050 - DNA, 129 bp, Artificial Sequence
  Description of Artificial Sequence: Synthetic antibody
attcgcttctctggctccaagtctggcatcacggcctccctgacaatctctgggctccaggctgaggacgaggctgattattactgctgctcatatgcaggtagtagcacttccgtgttgttcggcgga

SEQ ID NO: 2051 - protein, 43 aa, Artificial Sequence
  Description of Artificial Sequence: Synthetic antibody
IRFSGSKSGITASLTISGLQAEDEADYYCCSYAGSSTSVLFGG

SEQ ID NO: 2052 - DNA, 129 bp, Artificial Sequence
  Description of Artificial Sequence: Synthetic antibody
attcgcttctctggctccaagtctggcaacactgcctccctgacaatctctgggctccaggctgaggacgaggctgattattactgctgctcatatgcaggtagtagcacttccgtgttgttcggcgga

SEQ ID NO: 2053 - protein, 43 aa, Artificial Sequence
  Description of Artificial Sequence: Synthetic antibody
IRFSGSKSGNTASLTISGLQAEDEADYYCCSYAGSSTSVLFGG

SEQ ID NO: 2054 - DNA, 129 bp, Artificial Sequence
  Description of Artificial Sequence: Synthetic antibody
aatcgcttctctggctgcaagtctggcaccacggcctccctgacaatctctgggctccaggctgaggacgaggctgattattactgctgctcatatgcaggtagtagcacttccgtgttgttcggcgga

SEQ ID NO: 2055 - protein, 43 aa, Artificial Sequence
  Description of Artificial Sequence: Synthetic antibody
NRFSGCKSGTTASLTISGLQAEDEADYYCCSYAGSSTSVLFGG

SEQ ID NO: 2056 - DNA, 129 bp, Artificial Sequence
  Description of Artificial Sequence: Synthetic antibody
aatcgcttctctggctccaagtctggcaacacggcctccctgacaatctctgggctccaggctgaggacgaggctgattattactgctgctcatatgcaggtagtagcacttccgtgttgttcggcgga

SEQ ID NO: 2057 - protein, 43 aa, Artificial Sequence
  Description of Artificial Sequence: Synthetic antibody
NRFSGSKSGNTASLTISGLQAEDEADYYCCSYAGSSTSVLFGG

SEQ ID NO: 2058 - protein, 10 aa, Artificial Sequence
  Description of Artificial Sequence: Synthetic antibody
CAFTGSYEVF

SEQ ID NO: 2059 - DNA, 129 bp, Artificial Sequence
  Description of Artificial Sequence: Synthetic antibody
tgcctgatccgcttctctggctccaagtctggcaacacggcctccctgactatctctgggctccaggctgaggatgaggctgattattattgctgcgcgtttacaggcagctacgaggtgttcggcgga

SEQ ID NO: 2060 - protein, 43 aa, Artificial Sequence
  Description of Artificial Sequence: Synthetic antibody
CLIRFSGSKSGNTASLTISGLQAEDEADYYCCAFTGSYEVFGG

SEQ ID NO: 2061 - DNA, 129 bp, Artificial Sequence
  Description of Artificial Sequence: Synthetic antibody
gtccctgatcgcttctctggctccaagtctggcatctcggcctccctgactatctctgggctccaggctgaggatgaggctgattattattgctgcgcgtttacaggcagctacgaggtgttcggcgga

SEQ ID NO: 2062 - protein, 43 aa, Artificial Sequence
  Description of Artificial Sequence: Synthetic antibody
VPDRFSGSKSGISASLTISGLQAEDEADYYCCAFTGSYEVFGG

SEQ ID NO: 2063 - DNA, 129 bp, Artificial Sequence
  Description of Artificial Sequence: Synthetic antibody
gtccctgatcgcttctctggctccaagtctggcaacacggcctccctgtctatctctgggctcgaggctgaggatgaggctgattattattgctgcgcgtttacaggcagctacgaggtgttcggcgga

SEQ ID NO: 2064 - protein, 43 aa, Artificial Sequence
  Description of Artificial Sequence: Synthetic antibody
VPDRFSGSKSGNTASLSISGLEAEDEADYYCCAFTGSYEVFGG

SEQ ID NO: 2065 - DNA, 129 bp, Artificial Sequence
  Description of Artificial Sequence: Synthetic antibody
gtccctgatcgcttctctggctccaagtctggcaacacggcctccctgactatctctgggctccaggctgaggatgaggctgattattattgctgcgcgtttacaggcagctacgaggtgttcggcgga

SEQ ID NO: 2066 - protein, 43 aa, Artificial Sequence
  Description of Artificial Sequence: Synthetic antibody
VPDRFSGSKSGNTASLTISGLQAEDEADYYCCAFTGSYEVFGG

SEQ ID NO: 2067 - protein, 11 aa, Artificial Sequence
  Description of Artificial Sequence: Synthetic antibody
CSYAGSGTCVF

SEQ ID NO: 2068 - DNA, 129 bp, Artificial Sequence
  Description of Artificial Sequence: Synthetic antibody
tctattcgcttctccggctccaagtctggcaactcggcctccctgacaatctctgggctccgggctgaggacgaggctgattattactgctgctcatatgcaggtagtggcacctgcgtgttcggcgga

SEQ ID NO: 2069 - protein, 43 aa, Artificial Sequence
  Description of Artificial Sequence: Synthetic antibody
SIRFSGSKSGNSASLTISGLRAEDEADYYCCSYAGSGTCVFGG

SEQ ID NO: 2070 - DNA, 129 bp, Artificial Sequence
  Description of Artificial Sequence: Synthetic antibody
tctattcgcttctccggctccaagtctggcaacacggcctccctgagaatctctgggctccgggctgaggacgaggctgattattactgctgctcatatgcaggtagtggcacctgcgtgttcggcgga

SEQ ID NO: 2071 - protein, 43 aa, Artificial Sequence
  Description of Artificial Sequence: Synthetic antibody
SIRFSGSKSGNTASLRISGLRAEDEADYYCCSYAGSGTCVFGG

SEQ ID NO: 2072 - DNA, 129 bp, Artificial Sequence
  Description of Artificial Sequence: Synthetic antibody
tctaatcgcttctccggctccaagtctgggaactcggcctccctgacaatctctgggctccgggctgaggacgaggctgattattactgctgctcatatgcaggtagtggcacctgcgtgttcggcgga

SEQ ID NO: 2073 - protein, 43 aa, Artificial Sequence
  Description of Artificial Sequence: Synthetic antibody
SNRFSGSKSGNSASLTISGLRAEDEADYYCCSYAGSGTCVFGG

SEQ ID NO: 2074 - DNA, 129 bp, Artificial Sequence
  Description of Artificial Sequence: Synthetic antibody
tctaatcgcttctccggctccaagtctggcaacacggcctccctgacaatctctgggctccgggctgaggacgaggctgattattactgctgctcatatgcaggtagtggcacctgcgtgttcggcgga

SEQ ID NO: 2075 - protein, 43 aa, Artificial Sequence
  Description of Artificial Sequence: Synthetic antibody
SNRFSGSKSGNTASLTISGLRAEDEADYYCCSYAGSGTCVFGG

SEQ ID NO: 2076 - protein, 13 aa, Artificial Sequence
  Description of Artificial Sequence: Synthetic antibody
CSYAGSYTLSVVF

SEQ ID NO: 2077 - DNA, 129 bp, Artificial Sequence
  Description of Artificial Sequence: Synthetic antibody
cgcttctctggctccaagtctggcaactcggcctccctgaccatctctgggctcctggctgaggatgaggctgattattactgctgctcatatgcaggcagctacactttaagtgtggtattcggcgga

SEQ ID NO: 2078 - protein, 43 aa, Artificial Sequence
  Description of Artificial Sequence: Synthetic antibody
RFSGSKSGNSASLTISGLLAEDEADYYCCSYAGSYTLSVVFGG

SEQ ID NO: 2079 - DNA, 129 bp, Artificial Sequence
  Description of Artificial Sequence: Synthetic antibody
cgcttctctggctccaagtctggcaacacggcctccctgaccgtctctgggctccaggctgaggatggggctgattattactgctgctcatatgcaggcagctacactttaagtgtggtattcggcgga

SEQ ID NO: 2080 - protein, 43 aa, Artificial Sequence
  Description of Artificial Sequence: Synthetic antibody
RFSGSKSGNTASLTVSGLQAEDGADYYCCSYAGSYTLSVVFGG

SEQ ID NO: 2081 - DNA, 129 bp, Artificial Sequence
  Description of Artificial Sequence: Synthetic antibody
cgcttctctggctccaagtctggcaacacggcctccctgaccatctctgggctccaggctgaggatgaggctgattattactgctgctcatatgcaggcagctacactttaagtgtggtattcggcgga

SEQ ID NO: 2082 - protein, 43 aa, Artificial Sequence
  Description of Artificial Sequence: Synthetic antibody
RFSGSKSGNTASLTISGLQAEDEADYYCCSYAGSYTLSVVFGG

SEQ ID NO: 2083 - DNA, 129 bp, Artificial Sequence
  Description of Artificial Sequence: Synthetic antibody
tcgcttctctggctccaagtctggcaacacggcctccctgaccatctctggctccaggctgaggatgaggctgattattactgctgctcatatgcaggcagctacactttaagtgtggtattcggcgga

SEQ ID NO: 2084 - protein, 43 aa, Artificial Sequence
  Description of Artificial Sequence: Synthetic antibody
SLLWLQVWQHGLPDHLWLQAEDEADYYCCSYAGSYTLSVVFGG

SEQ ID NO: 2085 - protein, 11 aa, Artificial Sequence
  Description of Artificial Sequence: Synthetic antibody
CSYAASYTVVF

SEQ ID NO: 2086 - DNA, 129 bp, Artificial Sequence
  Description of Artificial Sequence: Synthetic antibody
cctgatcgcttctctggctccaagtctggcatcacggcctccctgaccatctctgggctccaggctgaggatgaggctgattattactgctgctcatatgcagccagctacaccgttgtattcggcgga

SEQ ID NO: 2087 - protein, 43 aa, Artificial Sequence
  Description of Artificial Sequence: Synthetic antibody
PDRFSGSKSGITASLTISGLQAEDEADYYCCSYAASYTVVFGG

SEQ ID NO: 2088 - DNA, 129 bp, Artificial Sequence
  Description of Artificial Sequence: Synthetic antibody
cctgatcgcttctctggctccaagtctggcaacacggcctccctgaccatctctgggctccaggctgaggatgaggctgattattactgctgctcatatgcagccagctacaccgtggtattcggcgga

SEQ ID NO: 2089 - protein, 43 aa, Artificial Sequence
  Description of Artificial Sequence: Synthetic antibody
PDRFSGSKSGNTASLTISGLQAEDEADYYCCSYAASYTVVFGG

SEQ ID NO: 2090 - DNA, 129 bp, Artificial Sequence
  Description of Artificial Sequence: Synthetic antibody
cctgatcgcttctctggctccaagtctggcaacacggcctccctgaccatctctgggctccaggctgaggatgaagctgattactactgctgctcatatgcagccagctacaccgtggtattcggcgga

SEQ ID NO: 2091 - DNA, 129 bp, Artificial Sequence
  Description of Artificial Sequence: Synthetic antibody
cctgatcgcttctctggcgccaagtctggcaacacggcctccctgaccatctctgggctccaggctgaggatgaggctgattattactgctgctcatatgcagccagttacaccgtggtattcggcgga

SEQ ID NO: 2092 - protein, 43 aa, Artificial Sequence
  Description of Artificial Sequence: Synthetic antibody
PDRFSGAKSGNTASLTISGLQAEDEADYYCCSYAASYTVVFGG

SEQ ID NO: 2093 - protein, 12 aa, Artificial Sequence
  Description of Artificial Sequence: Synthetic antibody
CSYAGSYTYYVF

SEQ ID NO: 2094 - DNA, 129 bp, Artificial Sequence
  Description of Artificial Sequence: Synthetic antibody
gatcgcttctctggctccatgtctggcaacacggcctccctgaccatctcttggctccaggctgaggatgaggctgattattactgctgctcatatgcaggcagctacacctattatgtcttcggaact

SEQ ID NO: 2095 - protein, 43 aa, Artificial Sequence
  Description of Artificial Sequence: Synthetic antibody
DRFSGSMSGNTASLTISWLQAEDEADYYCCSYAGSYTYYVFGT

SEQ ID NO: 2096 - DNA, 129 bp, Artificial Sequence
  Description of Artificial Sequence: Synthetic antibody
gatcgcttctctggctccaagtctggcatcacggcctccctgacgatctctgggctccaggctgaggatgaggctgattattactgctgctcatatgcaggcagctacacctattatgtcttcggaact

SEQ ID NO: 2097 - protein, 43 aa, Artificial Sequence
  Description of Artificial Sequence: Synthetic antibody
DRFSGSKSGITASLTISGLQAEDEADYYCCSYAGSYTYYVFGT

SEQ ID NO: 2098 - DNA, 129 bp, Artificial Sequence
  Description of Artificial Sequence: Synthetic antibody
gatcgcttctctggctccaagtctggcaacacggcctccctgaccatctctgggctccaggctgaggatgaggctgattattactgctgctcatatgcaggcagctacacctattatgtcttcggaact

SEQ ID NO: 2099 - protein, 43 aa, Artificial Sequence
  Description of Artificial Sequence: Synthetic antibody
DRFSGSKSGNTASLTISGLQAEDEADYYCCSYAGSYTYYVFGT

SEQ ID NO: 2100 - DNA, 129 bp, Artificial Sequence
  Description of Artificial Sequence: Synthetic antibody
atccgcttctctggctccaagtctggcaacacggcctccctgaccatctctgggctccaggctgaggatgaggctgattattactgctgctcatatgcaggcagctacacctattatgtcttcggaact

SEQ ID NO: 2101 - protein, 43 aa, Artificial Sequence
  Description of Artificial Sequence: Synthetic antibody
IRFSGSKSGNTASLTISGLQAEDEADYYCCSYAGSYTYYVFGT

SEQ ID NO: 2102 - protein, 13 aa, Artificial Sequence
  Description of Artificial Sequence: Synthetic antibody
CSYAGSSTFPVVF

SEQ ID NO: 2103 - DNA, 129 bp, Artificial Sequence
  Description of Artificial Sequence: Synthetic antibody
cgcttctctgtctccaagtctgtcaacacggcctccctgacaatctctgggctccaggctgaggacgaggctgattattactgctgctcatatgcaggtagtagcactttccctgtggtattcggcgga

SEQ ID NO: 2104 - protein, 43 aa, Artificial Sequence
  Description of Artificial Sequence: Synthetic antibody
RFSVSKSVNTASLTISGLQAEDEADYYCCSYAGSSTFPVVFGG

SEQ ID NO: 2105 - DNA, 129 bp, Artificial Sequence
  Description of Artificial Sequence: Synthetic antibody
cgcttctctggctccaagtctggcaacacggcctccctgacaatctctgggctccaggctgaggacgaggctgattattactgctgctcatatgcaggtagtagcactttccctgtggtattcggcgga

SEQ ID NO: 2106 - protein, 43 aa, Artificial Sequence
  Description of Artificial Sequence: Synthetic antibody
RFSGSKSGNTASLTISGLQAEDEADYYCCSYAGSSTFPVVFGG

SEQ ID NO: 2107 - DNA, 129 bp, Artificial Sequence
  Description of Artificial Sequence: Synthetic antibody
cgcttccctggctccaagtctggcaacacggcctccctgacaatctctgggctccaggctgaggacgaggctgattattactgctgctcatatgcaggtagtagcactttccctgtggtattcggccga

SEQ ID NO: 2108 - protein, 43 aa, Artificial Sequence
  Description of Artificial Sequence: Synthetic antibody
RFPGSKSGNTASLTISGLQAEDEADYYCCSYAGSSTFPVVFGR

SEQ ID NO: 2109 - DNA, 129 bp, Artificial Sequence
  Description of Artificial Sequence: Synthetic antibody
tcgcttctctgctccaagtctggcaacacggcctccctgacaatctctgggctccaggctgaggacgaggctgattattactgctgctcatatgcaggtagtagcactttccctgtggtattcggcgga

SEQ ID NO: 2110 - protein, 43 aa, Artificial Sequence
  Description of Artificial Sequence: Synthetic antibody
SLLCSKSGNTASLTISGLQAEDEADYYCCSYAGSSTFPVVFGG

SEQ ID NO: 2111 - protein, 11 aa, Artificial Sequence
  Description of Artificial Sequence: Synthetic antibody
CSYAGPSTLVF

SEQ ID NO: 2112 - DNA, 129 bp, Artificial Sequence
  Description of Artificial Sequence: Synthetic antibody
tcttatcgcttctctggctccaagtctggcaacacggcctccctgacaatctctgggctcctggctgaagacgaggctgattattactgctgctcatatgcaggtcctagcactttggttttcggcgga

SEQ ID NO: 2113 - protein, 43 aa, Artificial Sequence
  Description of Artificial Sequence: Synthetic antibody
SYRFSGSKSGNTASLTISGLLAEDEADYYCCSYAGPSTLVFGG

SEQ ID NO: 2114 - DNA, 129 bp, Artificial Sequence
  Description of Artificial Sequence: Synthetic antibody
tctattcgcttctctggctccaagtctggcaactcggcctccctgacaatctctgggctccaggctgaagacgaggctgattattactgctgctcatatgcaggtcctagcactttggttttcggcgga

SEQ ID NO: 2115 - protein, 43 aa, Artificial Sequence
  Description of Artificial Sequence: Synthetic antibody
SIRFSGSKSGNSASLTISGLQAEDEADYYCCSYAGPSTLVFGG

SEQ ID NO: 2116 - DNA, 129 bp, Artificial Sequence
  Description of Artificial Sequence: Synthetic antibody
tctaatcgcttctctggctccaagtctggcaactcggcctccctgactatctctgggctccaggctgaagacgaggctgattattactgctgctcatatgcaggtcctagcactttggttttcggcgga

SEQ ID NO: 2117 - protein, 43 aa, Artificial Sequence
  Description of Artificial Sequence: Synthetic antibody
SNRFSGSKSGNSASLTISGLQAEDEADYYCCSYAGPSTLVFGG

SEQ ID NO: 2118 - DNA, 129 bp, Artificial Sequence
  Description of Artificial Sequence: Synthetic antibody
tctaatcgcttctctggctccaagtctggcaacacggcctccctgacaatctctgggctccaggctgaagacgaggctgattattactgctgctcatatgcaggtcctagcactttggttttcggcgga

SEQ ID NO: 2119 - protein, 43 aa, Artificial Sequence
  Description of Artificial Sequence: Synthetic antibody
SNRFSGSKSGNTASLTISGLQAEDEADYYCCSYAGPSTLVFGG

SEQ ID NO: 2120 - protein, 10 aa, Artificial Sequence
  Description of Artificial Sequence: Synthetic antibody
CSYAGSPYVF

SEQ ID NO: 2121 - DNA, 129 bp, Artificial Sequence
  Description of Artificial Sequence: Synthetic antibody
tttctaatccgcttctctggctccaagtctggcaacacggcctccctgacaatctctgggctccaggctgaggacgaggctgattattactgctgctcatatgcaggtagtccttatgtcttcggaact

SEQ ID NO: 2122 - protein, 43 aa, Artificial Sequence
  Description of Artificial Sequence: Synthetic antibody
FLIRFSGSKSGNTASLTISGLQAEDEADYYCCSYAGSPYVFGT

SEQ ID NO: 2123 - DNA, 129 bp, Artificial Sequence
  Description of Artificial Sequence: Synthetic antibody
gtttctaatcgcttctctggctccaagtctggcaacacggcctccctgacaatctctgggctccaggctgaggacgaggctgattattactgctgctcatatgcaggtagtccttatgtcttcggaact

SEQ ID NO: 2124 - protein, 43 aa, Artificial Sequence
  Description of Artificial Sequence: Synthetic antibody
VSNRFSGSKSGNTASLTISGLQAEDEADYYCCSYAGSPYVFGT

SEQ ID NO: 2125 - DNA, 129 bp, Artificial Sequence
  Description of Artificial Sequence: Synthetic antibody
gttctaatccgcttctctggctccaagtctggcaacacggcctccctgacaatctctgggctccaggctgaggacgaggctgattattactgctgctcatatgcaggtagtccttatgtcttcggaact

SEQ ID NO: 2126 - protein, 43 aa, Artificial Sequence
  Description of Artificial Sequence: Synthetic antibody
VLIRFSGSKSGNTASLTISGLQAEDEADYYCCSYAGSPYVFGT

SEQ ID NO: 2127 - DNA, 129 bp, Artificial Sequence
  Description of Artificial Sequence: Synthetic antibody
gtttctaatcgcttctctggctccaagtctggcaacacggcctccctgacaatctctgggctccaggctgaggacgaggctgattattactgctgctcatatgcaggcagtccttatgtcttcggaact

SEQ ID NO: 2128 - protein, 11 aa, Artificial Sequence
  Description of Artificial Sequence: Synthetic antibody
CSYAGSYSWVF

SEQ ID NO: 2129 - DNA, 129 bp, Artificial Sequence
  Description of Artificial Sequence: Synthetic antibody
cctgatcgcttctctggctccaagtctggcatctcggcctccctgaccatctctgggctccaggctgaggatgaggctgattattactgctgctcatatgcaggcagctactcctgggtgttcggcgga

SEQ ID NO: 2130 - protein, 43 aa, Artificial Sequence
  Description of Artificial Sequence: Synthetic antibody
PDRFSGSKSGISASLTISGLQAEDEADYYCCSYAGSYSWVFGG

SEQ ID NO: 2131 - DNA, 129 bp, Artificial Sequence
  Description of Artificial Sequence: Synthetic antibody
cctgatcgcttctctggctccaagtctggcagcatggcctccctgaccatctctgggctccaggctgaggatgaggctgattattactgctgctcatatgcaggcagctactcctgggtgttcggcgga

SEQ ID NO: 2132 - protein, 43 aa, Artificial Sequence
  Description of Artificial Sequence: Synthetic antibody
PDRFSGSKSGSMASLTISGLQAEDEADYYCCSYAGSYSWVFGG

SEQ ID NO: 2133 - DNA, 129 bp, Artificial Sequence
  Description of Artificial Sequence: Synthetic antibody
cctgatcgcttctctggctccaagtctggcaacacggcctccctgaccatctctgggctccaggctgaggatgaggctgattattactgctgctcatatgcaggcagctactcctgggtgttcggcgga

SEQ ID NO: 2134 - protein, 43 aa, Artificial Sequence
  Description of Artificial Sequence: Synthetic antibody
PDRFSGSKSGNTASLTISGLQAEDEADYYCCSYAGSYSWVFGG

SEQ ID NO: 2135 - DNA, 129 bp, Artificial Sequence
  Description of Artificial Sequence: Synthetic antibody
cctgaccgcttctctggctccaagtctgacaacacggcctccctgaccatctctgggctccaggctgaggatgaggctgattattactgctgctcatatgcaggcagctactcctgggtgttcggcgga

SEQ ID NO: 2136 - protein, 43 aa, Artificial Sequence
  Description of Artificial Sequence: Synthetic antibody
PDRFSGSKSDNTASLTISGLQAEDEADYYCCSYAGSYSWVFGG

SEQ ID NO: 2137 - protein, 12 aa, Artificial Sequence
  Description of Artificial Sequence: Synthetic antibody
CSYAGDSFPYVF

SEQ ID NO: 2138 - DNA, 129 bp, Artificial Sequence
  Description of Artificial Sequence: Synthetic antibody
aatcgcttctctggctccatgtctggcatcacggcctccctgacaatctctgggctccaggctgaggacgaggctgattattactgctgctcatatgcaggtgatagcttcccttatgtcttcggaact

SEQ ID NO: 2139 - protein, 43 aa, Artificial Sequence
  Description of Artificial Sequence: Synthetic antibody
NRFSGSMSGITASLTISGLQAEDEADYYCCSYAGDSFPYVFGT

SEQ ID NO: 2140 - DNA, 129 bp, Artificial Sequence
  Description of Artificial Sequence: Synthetic antibody
aatcgcttctctggctccaagtctggcaacacggcctccctgacaatctctgggctccaggctgaggacgaggctgattattactgctgctcatatgcaggtgatagcttcccttatgtcttcggaact

SEQ ID NO: 2141 - protein, 43 aa, Artificial Sequence
  Description of Artificial Sequence: Synthetic antibody
NRFSGSKSGNTASLTISGLQAEDEADYYCCSYAGDSFPYVFGT

SEQ ID NO: 2142 - DNA, 129 bp, Artificial Sequence
  Description of Artificial Sequence: Synthetic antibody
aatcgattctctggctccaagtctggaaacacggcctccctgacaatctctgggctccaggctgaggacgaggctgattattactgctgctcatatgcaggtgatagcttcccttatgtcttcggaact

SEQ ID NO: 2143 - DNA, 129 bp, Artificial Sequence
  Description of Artificial Sequence: Synthetic antibody
atccgcttctctggctccaagtctggcaacacggcctccctgacaatctctgggctccaggctgaggacgaggctgattattactgctgctcatatgcaggtgatagcttcccttatgtcttcggaact

SEQ ID NO: 2144 - protein, 43 aa, Artificial Sequence
  Description of Artificial Sequence: Synthetic antibody
IRFSGSKSGNTASLTISGLQAEDEADYYCCSYAGDSFPYVFGT

SEQ ID NO: 2145 - protein, 12 aa, Artificial Sequence
  Description of Artificial Sequence: Synthetic antibody
CSYAGSTTFVLF

SEQ ID NO: 2146 - DNA, 129 bp, Artificial Sequence
  Description of Artificial Sequence: Synthetic antibody
tatcgcttctctggctccaagtctggcatcacggcctccctgaaattctctggactccaggctgaggacgaggctgattattactgctgctcatatgcaggtagtaccactttcgttctattcggcgga

SEQ ID NO: 2147 - protein, 43 aa, Artificial Sequence
  Description of Artificial Sequence: Synthetic antibody
YRFSGSKSGITASLKFSGLQAEDEADYYCCSYAGSTTFVLFGG

SEQ ID NO: 2148 - DNA, 129 bp, Artificial Sequence
  Description of Artificial Sequence: Synthetic antibody
tatcgcttctctggctccaagtctggcaacacggcctccctgaaaatctctggactccaggctgaggacgaggctgattattactgctgctcatatgcaggtagtaccactttcgttctattcggcgga

SEQ ID NO: 2149 - protein, 43 aa, Artificial Sequence
  Description of Artificial Sequence: Synthetic antibody
YRFSGSKSGNTASLKISGLQAEDEADYYCCSYAGSTTFVLFGG

SEQ ID NO: 2150 - DNA, 129 bp, Artificial Sequence
  Description of Artificial Sequence: Synthetic antibody
tatcgattctctggctccaagtctggcaacacggcctccctgataatctctggactccaggctgaggacgaggctgattattactgctgctcatatgcaggtagtaccactttcgttctattcggcgga

SEQ ID NO: 2151 - protein, 43 aa, Artificial Sequence
  Description of Artificial Sequence: Synthetic antibody
YRFSGSKSGNTASLIISGLQAEDEADYYCCSYAGSTTFVLFGG

SEQ ID NO: 2152 - DNA, 129 bp, Artificial Sequence
  Description of Artificial Sequence: Synthetic antibody
atacgcttctctggctccaagtctggcaacacggcctccctgaaaatctctggactccaggctgaggacgaggctgattattactgctgctcatatgcaggtagtaccactttcgttctattcggcgga

SEQ ID NO: 2153 - protein, 43 aa, Artificial Sequence
  Description of Artificial Sequence: Synthetic antibody
IRFSGSKSGNTASLKISGLQAEDEADYYCCSYAGSTTFVLFGG

SEQ ID NO: 2154 - protein, 10 aa, Artificial Sequence
  Description of Artificial Sequence: Synthetic antibody
CSYAGSYTLF

SEQ ID NO: 2155 - DNA, 129 bp, Artificial Sequence
  Description of Artificial Sequence: Synthetic antibody
gtccctgatcgcttctctggctccaagtctggctacacggcctccctgacgatctctgggctccaggctgaggatgaggctgattattactgctgctcatatgcaggcagctacactttattcggcgga

SEQ ID NO: 2156 - protein, 43 aa, Artificial Sequence
  Description of Artificial Sequence: Synthetic antibody
VPDRFSGSKSGYTASLTISGLQAEDEADYYCCSYAGSYTLFGG

SEQ ID NO: 2157 - DNA, 129 bp, Artificial Sequence
  Description of Artificial Sequence: Synthetic antibody
gtccctgatcgcttctctggctccaagtctggcatcacggcctccctgaccatctctgggctccagtctgaggatgaggctgattattactgctgctcatatgcaggcagctacactttattcggcgga

SEQ ID NO: 2158 - protein, 43 aa, Artificial Sequence
  Description of Artificial Sequence: Synthetic antibody
VPDRFSGSKSGITASLTISGLQSEDEADYYCCSYAGSYTLFGG

SEQ ID NO: 2159 - DNA, 129 bp, Artificial Sequence
  Description of Artificial Sequence: Synthetic antibody
gtccctgatcgcttctctggctccaagtctggcaacacggcctccctgaccatctcttggctccagtctgaggatgaggctgattattactgctgctcatatgcaggcagctacactttattcggcgga

SEQ ID NO: 2160 - protein, 43 aa, Artificial Sequence
  Description of Artificial Sequence: Synthetic antibody
VPDRFSGSKSGNTASLTISWLQSEDEADYYCCSYAGSYTLFGG

SEQ ID NO: 2161 - DNA, 129 bp, Artificial Sequence
  Description of Artificial Sequence: Synthetic antibody
gtccctgatcgcttctctggctccaagtctggcaacacggcctccctgaccatctctgggctccaggctgaggatgaggctgattattactgctgctcatatgcaggcagctacactttattcggcgga

SEQ ID NO: 2162 - protein, 43 aa, Artificial Sequence
  Description of Artificial Sequence: Synthetic antibody
VPDRFSGSKSGNTASLTISGLQAEDEADYYCCSYAGSYTLFGG

SEQ ID NO: 2163 - protein, 12 aa, Artificial Sequence
  Description of Artificial Sequence: Synthetic antibody
CSYAGSSTFEVF

SEQ ID NO: 2164 - DNA, 129 bp, Artificial Sequence
  Description of Artificial Sequence: Synthetic antibody
tatcgcttctctggctccaagtctggcatcacggcctccctgacaatctctgggctccaggctgaggacgaggctgattattactgctgctcatatgcaggtagtagcactttcgaggtcttcggaact

SEQ ID NO: 2165 - protein, 43 aa, Artificial Sequence
  Description of Artificial Sequence: Synthetic antibody
YRFSGSKSGITASLTISGLQAEDEADYYCCSYAGSSTFEVFGT

SEQ ID NO: 2166 - DNA, 129 bp, Artificial Sequence
  Description of Artificial Sequence: Synthetic antibody
aatcgcttctctggctccaagtctggcaagacggcctgcctgacaatctctgggctccaggctgaggacgaggctgattattactgctgctcatatgcaggtagtagcactttcgaggtcttcggaact

SEQ ID NO: 2167 - protein, 43 aa, Artificial Sequence
  Description of Artificial Sequence: Synthetic antibody
NRFSGSKSGKTACLTISGLQAEDEADYYCCSYAGSSTFEVFGT

SEQ ID NO: 2168 - DNA, 129 bp, Artificial Sequence
  Description of Artificial Sequence: Synthetic antibody
aatcgcttctctggctccaagtctggcaacacggcctccctgacaatctctgggctccaggctgaggacgaggctgattattactgctgctcatatgcaggtagtagtactttcgaagtcttcggaact

SEQ ID NO: 2169 - protein, 43 aa, Artificial Sequence
  Description of Artificial Sequence: Synthetic antibody
NRFSGSKSGNTASLTISGLQAEDEADYYCCSYAGSSTFEVFGT

SEQ ID NO: 2170 - DNA, 129 bp, Artificial Sequence
  Description of Artificial Sequence: Synthetic antibody
aatcgcttctctggctccaagtctggcaacacggcctccctgacaatctctgggctccaggctgaggacgaggctgattattactgctgctcatatgcaggtagtagcactttcgaggtcttcggaact

SEQ ID NO: 2171 - protein, 11 aa, Artificial Sequence
  Description of Artificial Sequence: Synthetic antibody
CSYAGTYTYVF

SEQ ID NO: 2172 - DNA, 129 bp, Artificial Sequence
  Description of Artificial Sequence: Synthetic antibody
ctgatccgcttctctggctccaagtctggcaacacggcctccctgaccatctctgggctccaggctgaggatgaggctgattattactgctgctcatatgcaggcacctacacttacgtcttcggaact

SEQ ID NO: 2173 - protein, 43 aa, Artificial Sequence
  Description of Artificial Sequence: Synthetic antibody
LIRFSGSKSGNTASLTISGLQAEDEADYYCCSYAGTYTYVFGT

SEQ ID NO: 2174 - DNA, 129 bp, Artificial Sequence
  Description of Artificial Sequence: Synthetic antibody
cctgatcgcttctctggctccaagtctggctacacggcctccctgaccatctctgtgctccaggctgaggatgaggctgattattactgctgctcatatgcaggcacctacacttacgtcttcggaact

SEQ ID NO: 2175 - protein, 43 aa, Artificial Sequence
  Description of Artificial Sequence: Synthetic antibody
PDRFSGSKSGYTASLTISVLQAEDEADYYCCSYAGTYTYVFGT

SEQ ID NO: 2176 - DNA, 129 bp, Artificial Sequence
  Description of Artificial Sequence: Synthetic antibody
cctgatcgcttctctggctccaagtctggcaacacggcctccctgaccatctctgggctccaggctgaggatgaggctgattattactgctgctcatatgcaggcacctacacttacgtcttcggaact

SEQ ID NO: 2177 - protein, 43 aa, Artificial Sequence
  Description of Artificial Sequence: Synthetic antibody
PDRFSGSKSGNTASLTISGLQAEDEADYYCCSYAGTYTYVFGT

SEQ ID NO: 2178 - DNA, 129 bp, Artificial Sequence
  Description of Artificial Sequence: Synthetic antibody
cctgatcgcttctctggccccaagtctggcaacacggcctcgctgaccatctctgggctccaggctgaggatgaggctgattattactgctgctcatatgcaggcacctacacttacgtcttcggaact

SEQ ID NO: 2179 - protein, 43 aa, Artificial Sequence
  Description of Artificial Sequence: Synthetic antibody
PDRFSGPKSGNTASLTISGLQAEDEADYYCCSYAGTYTYVFGT

SEQ ID NO: 2180 - protein, 12 aa, Artificial Sequence
  Description of Artificial Sequence: Synthetic antibody
CSYAGSYTFKVF

SEQ ID NO: 2181 - DNA, 129 bp, Artificial Sequence
  Description of Artificial Sequence: Synthetic antibody
gatcgcttctctggctccaagtcttgcaacacggcctccctgaccatctctgggctccaggctgagtatgaggctgattattactgctgctcatatgcaggcagctacactttcaaggtattcggcgga

SEQ ID NO: 2182 - protein, 43 aa, Artificial Sequence
  Description of Artificial Sequence: Synthetic antibody
DRFSGSKSCNTASLTISGLQAEYEADYYCCSYAGSYTFKVFGG

SEQ ID NO: 2183 - DNA, 129 bp, Artificial Sequence
  Description of Artificial Sequence: Synthetic antibody
gatcgcttctctggctccaagtctggcaacacggcctccctgaccatctctgggctccaggctgaggatgaggctgattattactgctgctcatatgcaggcagctacactttcaaggtattcggcgga

SEQ ID NO: 2184 - protein, 43 aa, Artificial Sequence
  Description of Artificial Sequence: Synthetic antibody
DRFSGSKSGNTASLTISGLQAEDEADYYCCSYAGSYTFKVFGG

SEQ ID NO: 2185 - DNA, 129 bp, Artificial Sequence
  Description of Artificial Sequence: Synthetic antibody
gttcgcttctctggctccaagtctggcaacacggcctccctgaccatctctgggctccaggctgaggatgaggctgattattactgctgctcatatgcaggcagctacactttcaaggtattcggcgga

SEQ ID NO: 2186 - protein, 43 aa, Artificial Sequence
  Description of Artificial Sequence: Synthetic antibody
VRFSGSKSGNTASLTISGLQAEDEADYYCCSYAGSYTFKVFGG

SEQ ID NO: 2187 - DNA, 129 bp, Artificial Sequence
  Description of Artificial Sequence: Synthetic antibody
atccgcttctctggctccaagtctggcaacacggcctccctgaccatctctgggctccaggctgaggatgaggctgattattactgctgctcatatgcaggcagctacactttcaaggtattcggcgga

SEQ ID NO: 2188 - protein, 43 aa, Artificial Sequence
  Description of Artificial Sequence: Synthetic antibody
IRFSGSKSGNTASLTISGLQAEDEADYYCCSYAGSYTFKVFGG

SEQ ID NO: 2189 - protein, 11 aa, Artificial Sequence
  Description of Artificial Sequence: Synthetic antibody
CSYTVSSTYLF

SEQ ID NO: 2190 - DNA, 129 bp, Artificial Sequence
  Description of Artificial Sequence: Synthetic antibody
tctagtcgcttctcttgctccaagtctgccgacacggcctccctgtccatctctgggctgcaggctgaggacgaggctgattattactgctgctcatatacagttagcagcacttatctcttcggcact

SEQ ID NO: 2191 - protein, 43 aa, Artificial Sequence
  Description of Artificial Sequence: Synthetic antibody
SSRFSCSKSADTASLSISGLQAEDEADYYCCSYTVSSTYLFGT

SEQ ID NO: 2192 - DNA, 129 bp, Artificial Sequence
  Description of Artificial Sequence: Synthetic antibody
tctagtcgcttctctggctccaagtctgccgacacggcctccctgaccatctctgggctgcaggctgaggacgaggctgattattactgctgctcatatacagttagcagcacttatctcttcggcact

SEQ ID NO: 2193 - protein, 43 aa, Artificial Sequence
  Description of Artificial Sequence: Synthetic antibody
SSRFSGSKSADTASLTISGLQAEDEADYYCCSYTVSSTYLFGT

SEQ ID NO: 2194 - DNA, 129 bp, Artificial Sequence
  Description of Artificial Sequence: Synthetic antibody
tctagtcgcttctctggctccaagtcagccgacacggcctccctgaccatctctgggctccaggctgaagacgaagctgattattactgctgctcatatacagttagtagcacttatctcttcggcact

SEQ ID NO: 2195 - protein, 12 aa, Artificial Sequence
  Description of Artificial Sequence: Synthetic antibody
CSFEGSSTLWVF

SEQ ID NO: 2196 - DNA, 129 bp, Artificial Sequence
  Description of Artificial Sequence: Synthetic antibody
attcgtttctctggctccaagtccggcaacacggcctccctgacaatctctgtgctccaggctgaggacggggctgattattactgctgctcgtttgaaggtagcagcactctttgggtgttcggcgga

SEQ ID NO: 2197 - protein, 43 aa, Artificial Sequence
  Description of Artificial Sequence: Synthetic antibody
IRFSGSKSGNTASLTISVLQAEDGADYYCCSFEGSSTLWVFGG

SEQ ID NO: 2198 - DNA, 129 bp, Artificial Sequence
  Description of Artificial Sequence: Synthetic antibody
attcgtttctctggctccaagtccggcaacacggcctccctgacaatctctgggctccaggctgaggacgtggctgattattactgctgctcgtttgaaggtagcagcactctttgggtgttcggcgga

SEQ ID NO: 2199 - protein, 43 aa, Artificial Sequence
  Description of Artificial Sequence: Synthetic antibody
IRFSGSKSGNTASLTISGLQAEDVADYYCCSFEGSSTLWVFGG

SEQ ID NO: 2200 - DNA, 129 bp, Artificial Sequence
  Description of Artificial Sequence: Synthetic antibody
aatcgtttctctggctccaagtccggcaacacggcctccctgacaatctctgggctccaggctgaggacggggctgattattactgctgctcgtttgaaggtagcagcactctttgggtgttcggcgga

SEQ ID NO: 2201 - protein, 43 aa, Artificial Sequence
  Description of Artificial Sequence: Synthetic antibody
NRFSGSKSGNTASLTISGLQAEDGADYYCCSFEGSSTLWVFGG

SEQ ID NO: 2202 - protein, 10 aa, Artificial Sequence
  Description of Artificial Sequence: Synthetic antibody
CSYAGSSTPF

SEQ ID NO: 2203 - DNA, 129 bp, Artificial Sequence
  Description of Artificial Sequence: Synthetic antibody
tttctaatccgcttctctggctccaagtctggcaacacggcctccctgacaatctctgggctccaggctgaggacgaggctgattattactgctgctcatatgcaggtagtagcactcccttcggaact

SEQ ID NO: 2204 - protein, 43 aa, Artificial Sequence
  Description of Artificial Sequence: Synthetic antibody
FLIRFSGSKSGNTASLTISGLQAEDEADYYCCSYAGSSTPFGT

SEQ ID NO: 2205 - DNA, 129 bp, Artificial Sequence
  Description of Artificial Sequence: Synthetic antibody
gtttctaatcgcttctctggctccaagtctggcaacacggcctccctgactatctctgggctcctggctgaggacgaggctgattattactgctgctcatatgcaggtagtagcactcccttcggaact

SEQ ID NO: 2206 - protein, 43 aa, Artificial Sequence
  Description of Artificial Sequence: Synthetic antibody
VSNRFSGSKSGNTASLTISGLLAEDEADYYCCSYAGSSTPFGT

SEQ ID NO: 2207 - DNA, 129 bp, Artificial Sequence
  Description of Artificial Sequence: Synthetic antibody
gtttctaatcgcttctctggctccaagtctggcaacacggcctccctgacaatctctgggctccaggctgaggacgaggctgattattactgctgctcatatgcaggtagtagcactcccttcggaact

SEQ ID NO: 2208 - protein, 43 aa, Artificial Sequence
  Description of Artificial Sequence: Synthetic antibody
VSNRFSGSKSGNTASLTISGLQAEDEADYYCCSYAGSSTPFGT

SEQ ID NO: 2209 - protein, 9 aa, Artificial Sequence
  Description of Artificial Sequence: Synthetic antibody
CSYAGRDVF

SEQ ID NO: 2210 - DNA, 129 bp, Artificial Sequence
  Description of Artificial Sequence: Synthetic antibody
ggtgtttctaatcgcttctctgtctccaagtctggcaacacggcctccctgacaatctctgggctccaggctgaggacgaggctgattattactgctgctcatatgcaggtagggatgtcttcggaact

SEQ ID NO: 2211 - protein, 43 aa, Artificial Sequence
  Description of Artificial Sequence: Synthetic antibody
GVSNRFSVSKSGNTASLTISGLQAEDEADYYCCSYAGRDVFGT

SEQ ID NO: 2212 - DNA, 129 bp, Artificial Sequence
  Description of Artificial Sequence: Synthetic antibody
ggtgtttctaatcgcttctctggctccaagtctggcaacacggcctccctgactatctctgggctccaggctgaggacgaggctgattattactgctgctcatatgcaggtagggatgtcttcggaact

SEQ ID NO: 2213 - protein, 43 aa, Artificial Sequence
  Description of Artificial Sequence: Synthetic antibody
GVSNRFSGSKSGNTASLTISGLQAEDEADYYCCSYAGRDVFGT

SEQ ID NO: 2214 - DNA, 129 bp, Artificial Sequence
  Description of Artificial Sequence: Synthetic antibody
ggggtttctaatcgcttctctggctccaagtctggcaacacggcctccctgacaatctctgggctccaggctgaggacgaggctgattattactgctgctcatatgcaggtagggatgtcttcggaact

SEQ ID NO: 2215 - protein, 11 aa, Artificial Sequence
  Description of Artificial Sequence: Synthetic antibody
CSYAGSYTVIF

SEQ ID NO: 2216 - DNA, 129 bp, Artificial Sequence
  Description of Artificial Sequence: Synthetic antibody
cctgatcgcttctctggctccaagtctggcaactcggcctccctgacgatctctgggctccaggctgaggatgaagctgattattactgctgctcatatgcaggcagctacactgtgatattcggcgga

SEQ ID NO: 2217 - protein, 43 aa, Artificial Sequence
  Description of Artificial Sequence: Synthetic antibody
PDRFSGSKSGNSASLTISGLQAEDEADYYCCSYAGSYTVIFGG

SEQ ID NO: 2218 - DNA, 129 bp, Artificial Sequence
  Description of Artificial Sequence: Synthetic antibody
cctgatcgcttctctggctccaagtctggcaacacggcctccctgaccatctctgtgctccatgctgaggatgaagctgattattactgctgctcatatgcaggcagctacactgtgatattcggcgga

SEQ ID NO: 2219 - protein, 43 aa, Artificial Sequence
  Description of Artificial Sequence: Synthetic antibody
PDRFSGSKSGNTASLTISVLHAEDEADYYCCSYAGSYTVIFGG

SEQ ID NO: 2220 - DNA, 129 bp, Artificial Sequence
  Description of Artificial Sequence: Synthetic antibody
cctgatcgcttctctggctccaagtctggcaacacggcctccctgaccatctctgggctccaggctgaggatgaagctgattattactgctgctcatatgcaggcagctacactgtgatattcggcgga

SEQ ID NO: 2221 - protein, 43 aa, Artificial Sequence
  Description of Artificial Sequence: Synthetic antibody
PDRFSGSKSGNTASLTISGLQAEDEADYYCCSYAGSYTVIFGG

SEQ ID NO: 2222 - protein, 10 aa, Artificial Sequence
  Description of Artificial Sequence: Synthetic antibody
CSYAGTYVVF

SEQ ID NO: 2223 - DNA, 129 bp, Artificial Sequence
  Description of Artificial Sequence: Synthetic antibody
gtttcgtatcgcttctctggctctaagtctggctacacggcctccctgacaatctcttggctccaggctgaggacgaggctgattattcctgctgctcatatgcaggtacttatgtggtcttcggcgga

SEQ ID NO: 2224 - protein, 43 aa, Artificial Sequence
  Description of Artificial Sequence: Synthetic antibody
VSYRFSGSKSGYTASLTISWLQAEDEADYSCCSYAGTYVVFGG

SEQ ID NO: 2225 - DNA, 129 bp, Artificial Sequence
  Description of Artificial Sequence: Synthetic antibody
gtttcgaatcgcttctctggctctaagtctggctacacggcctccctgacaatctctgggctccaggctgaggacgaggctgattattcctgctgctcatatgcaggtacttatgtggtcttcggcgga

SEQ ID NO: 2226 - protein, 43 aa, Artificial Sequence
  Description of Artificial Sequence: Synthetic antibody
VSNRFSGSKSGYTASLTISGLQAEDEADYSCCSYAGTYVVFGG

SEQ ID NO: 2227 - DNA, 129 bp, Artificial Sequence
  Description of Artificial Sequence: Synthetic antibody
gtttcgaatcgcttctctggctctaagtctggctacacggcctccctgacaacctctgggctccaggctgaggacgaggctgattattcccgctgctcatatgcaggtacttatgtggtcttcggcgga

SEQ ID NO: 2228 - protein, 43 aa, Artificial Sequence
  Description of Artificial Sequence: Synthetic antibody
VSNRFSGSKSGYTASLTTSGLQAEDEADYSRCSYAGTYVVFGG

SEQ ID NO: 2229 - protein, 10 aa, Artificial Sequence
  Description of Artificial Sequence: Synthetic antibody
CSYAGSSSFF

SEQ ID NO: 2230 - DNA, 129 bp, Artificial Sequence
  Description of Artificial Sequence: Synthetic antibody
tttctaatccgcttctctggctccaagtctggcaacacggcctccctgacaatctctgggctccaggctgaggacgaggctgattattactgctgctcatatgcaggtagtagctctttcttcggaact

SEQ ID NO: 2231 - protein, 43 aa, Artificial Sequence
  Description of Artificial Sequence: Synthetic antibody
FLIRFSGSKSGNTASLTISGLQAEDEADYYCCSYAGSSSFFGT

SEQ ID NO: 2232 - DNA, 129 bp, Artificial Sequence
  Description of Artificial Sequence: Synthetic antibody
gtttctaatcgcttctctggctccaagtctggcaacacggcctccctgacaatctctgggctgctggctgaggacgaggctgattattactgctgctcatatgcaggtagtagctctttcttcggaact

SEQ ID NO: 2233 - protein, 43 aa, Artificial Sequence
  Description of Artificial Sequence: Synthetic antibody
VSNRFSGSKSGNTASLTISGLLAEDEADYYCCSYAGSSSFFGT

SEQ ID NO: 2234 - DNA, 129 bp, Artificial Sequence
  Description of Artificial Sequence: Synthetic antibody
gtttctaatcgcttctctggctccaagtctggcaacacggcctccctgacaatctctgggctccaggctgaggacgaggctgattattactgctgctcatatgcaggtagtagctctttcttcggaact

SEQ ID NO: 2235 - protein, 43 aa, Artificial Sequence
  Description of Artificial Sequence: Synthetic antibody
VSNRFSGSKSGNTASLTISGLQAEDEADYYCCSYAGSSSFFGT

SEQ ID NO: 2236 - protein, 12 aa, Artificial Sequence
  Description of Artificial Sequence: Synthetic antibody
CSYAGSSTSYVF

SEQ ID NO: 2237 - DNA, 129 bp, Artificial Sequence
  Description of Artificial Sequence: Synthetic antibody
aatcgcttctctggctctaagtctggcaacacagcctccctgacaatctctgggctccaggctgaggacgaggctgattattactgctgctcatatgcaggtagtagcacttcttatgtcttcggaact

SEQ ID NO: 2238 - protein, 43 aa, Artificial Sequence
  Description of Artificial Sequence: Synthetic antibody
NRFSGSKSGNTASLTISGLQAEDEADYYCCSYAGSSTSYVFGT

SEQ ID NO: 2239 - DNA, 129 bp, Artificial Sequence
  Description of Artificial Sequence: Synthetic antibody
aatcgcttctctggctccaagtctggcaacacggcctccctgacaatctctgggctccaggctgaggacgaggctgattattactgctgctcatatgcaggtagtagcacttcttatgtcttcggaact

SEQ ID NO: 2240 - DNA, 129 bp, Artificial Sequence
  Description of Artificial Sequence: Synthetic antibody
atccgcttctctggctccaagtctggcaacacggcctccctgacaatctctgggctccaggctgaggacgaggctgattattactgctgctcatatgcaggtagtagcacttcttatgtcttcggaact

SEQ ID NO: 2241 - protein, 43 aa, Artificial Sequence
  Description of Artificial Sequence: Synthetic antibody
IRFSGSKSGNTASLTISGLQAEDEADYYCCSYAGSSTSYVFGT

SEQ ID NO: 2242 - protein, 10 aa, Artificial Sequence
  Description of Artificial Sequence: Synthetic antibody
CSYAGSSYVF

SEQ ID NO: 2243 - DNA, 129 bp, Artificial Sequence
  Description of Artificial Sequence: Synthetic antibody
gtccctgttcgcttctctggctccaagtctggcaacacggcctccctgaccatgtctgggctccaggctgaggatgaggctgattattactgctgctcatatgcaggcagctcttatgtcttcggaact

SEQ ID NO: 2244 - protein, 43 aa, Artificial Sequence
  Description of Artificial Sequence: Synthetic antibody
VPVRFSGSKSGNTASLTMSGLQAEDEADYYCCSYAGSSYVFGT

SEQ ID NO: 2245 - DNA, 129 bp, Artificial Sequence
  Description of Artificial Sequence: Synthetic antibody
gtccctgatcgcttgtctggctccatgtctggcaacacggcctccctgaccatctctgggctccagtctgaggatgaggctgattattactgctgctcatatgcaggcagctcttatgtcttcggaact

SEQ ID NO: 2246 - protein, 43 aa, Artificial Sequence
  Description of Artificial Sequence: Synthetic antibody
VPDRLSGSMSGNTASLTISGLQSEDEADYYCCSYAGSSYVFGT

SEQ ID NO: 2247 - DNA, 129 bp, Artificial Sequence
  Description of Artificial Sequence: Synthetic antibody
gtccctgatcgcttctctggctccaagtctggcaacacggcctccctgaccatctctgggctccaggctgaggatgaggctgattattactgctgctcatatgcaggcagctcttatgtcttcggaact

SEQ ID NO: 2248 - protein, 43 aa, Artificial Sequence
  Description of Artificial Sequence: Synthetic antibody
VPDRFSGSKSGNTASLTISGLQAEDEADYYCCSYAGSSYVFGT

SEQ ID NO: 2249 - protein, 10 aa, Artificial Sequence
  Description of Artificial Sequence: Synthetic antibody
CSYAGSSPVF

SEQ ID NO: 2250 - DNA, 129 bp, Artificial Sequence
  Description of Artificial Sequence: Synthetic antibody
gtttctaatctcttctctggctccaagtctggctacacggcctccctgacaatctctgggctccaggctgaggacgaggctgattattactgctgctcatatgcaggtagtagccctgtattcggcgga

SEQ ID NO: 2251 - protein, 43 aa, Artificial Sequence
  Description of Artificial Sequence: Synthetic antibody
VSNLFSGSKSGYTASLTISGLQAEDEADYYCCSYAGSSPVFGG

SEQ ID NO: 2252 - DNA, 129 bp, Artificial Sequence
  Description of Artificial Sequence: Synthetic antibody
gtttctaatcgcttctctggctccaagtctggcaacacggcctccctgacaatctctgggctccaggctgaggacgaggctgattattactgctgctcatatgcaggtagtagccctgtattcggcgga

SEQ ID NO: 2253 - protein, 43 aa, Artificial Sequence
  Description of Artificial Sequence: Synthetic antibody
VSNRFSGSKSGNTASLTISGLQAEDEADYYCCSYAGSSPVFGG

SEQ ID NO: 2254 - DNA, 129 bp, Artificial Sequence
  Description of Artificial Sequence: Synthetic antibody
ggtttctatcgcttctctggctccaagtctggcaacacggcctccctgacaatctctgggctccaggctgaggacgaggctgattattactgctgctcatatgcaggtagtagccctgtattcggcgga

SEQ ID NO: 2255 - protein, 43 aa, Artificial Sequence
  Description of Artificial Sequence: Synthetic antibody
GFYRFSGSKSGNTASLTISGLQAEDEADYYCCSYAGSSPVFGG

SEQ ID NO: 2256 - protein, 10 aa, Artificial Sequence
  Description of Artificial Sequence: Synthetic antibody
CSYAGNSYVF

SEQ ID NO: 2257 - DNA, 129 bp, Artificial Sequence
  Description of Artificial Sequence: Synthetic antibody
gtcgctgatcgcttctctggctccaagtctggcaacacggcctccctgaccatctctgggctcgaggctgacgatgaggctgattattactgctgctcatatgcaggcaactcttatgtcttcggaact

SEQ ID NO: 2258 - protein, 43 aa, Artificial Sequence
  Description of Artificial Sequence: Synthetic antibody
VADRFSGSKSGNTASLTISGLEADDEADYYCCSYAGNSYVFGT

SEQ ID NO: 2259 - DNA, 129 bp, Artificial Sequence
  Description of Artificial Sequence: Synthetic antibody
gtccctgatcgcttctctggctccaagtctggcaacacggcctccctgaccatctctgggctccaggctgacgatgaggctgattattactgctgctcatatgcaggcaactcttatgtcttcggaact

SEQ ID NO: 2260 - protein, 43 aa, Artificial Sequence
  Description of Artificial Sequence: Synthetic antibody
VPDRFSGSKSGNTASLTISGLQADDEADYYCCSYAGNSYVFGT

SEQ ID NO: 2261 - DNA, 129 bp, Artificial Sequence
  Description of Artificial Sequence: Synthetic antibody
gtacctgatcgcttctctggctccaagtctggcaactcggcctccctgaccatctctgggctccaggctgacgatgaggctgattattactgctgctcatatgcaggcaactcttatgtcttcggaact

SEQ ID NO: 2262 - protein, 43 aa, Artificial Sequence
  Description of Artificial Sequence: Synthetic antibody
VPDRFSGSKSGNSASLTISGLQADDEADYYCCSYAGNSYVFGT

SEQ ID NO: 2263 - protein, 9 aa, Artificial Sequence
  Description of Artificial Sequence: Synthetic antibody
CSYAGSYTF

SEQ ID NO: 2264 - DNA, 129 bp, Artificial Sequence
  Description of Artificial Sequence: Synthetic antibody
agggtccctgatcgcttctctggctccaagtctggcaacacggcctccctgaccatctctgggctccaggctgaggatgaggctgattattactgctgctcatatgcaggcagctacactttcggcgga

SEQ ID NO: 2265 - protein, 43 aa, Artificial Sequence
  Description of Artificial Sequence: Synthetic antibody
RVPDRFSGSKSGNTASLTISGLQAEDEADYYCCSYAGSYTFGG

SEQ ID NO: 2266 - DNA, 129 bp, Artificial Sequence
  Description of Artificial Sequence: Synthetic antibody
ggggtccctgatcgcttctctggctccaagtctggcaactcggcctccctgagcatctctgggctccaggctgaggatgaggctgattattactgctgctcatatgcaggcagctacactttcggcgga

SEQ ID NO: 2267 - protein, 43 aa, Artificial Sequence
  Description of Artificial Sequence: Synthetic antibody
GVPDRFSGSKSGNSASLSISGLQAEDEADYYCCSYAGSYTFGG

SEQ ID NO: 2268 - DNA, 129 bp, Artificial Sequence
  Description of Artificial Sequence: Synthetic antibody
ggggtccctgatcgcttctctggctccaagtctggcaacacggcctccctgaccatctctgggctccaggctgaggatgaggctgattattactgctgctcatatgcaggcagctacactttcggcgga

SEQ ID NO: 2269 - protein, 43 aa, Artificial Sequence
  Description of Artificial Sequence: Synthetic antibody
GVPDRFSGSKSGNTASLTISGLQAEDEADYYCCSYAGSYTFGG

SEQ ID NO: 2270 - protein, 11 aa, Artificial Sequence
  Description of Artificial Sequence: Synthetic antibody
CSYAGSYSMIF

SEQ ID NO: 2271 - DNA, 129 bp, Artificial Sequence
  Description of Artificial Sequence: Synthetic antibody
cctgatcgcttctctggctccaagtctggcaacacggcctccctgaccatctctgggctccaggctgaggatgaggctgattattactgctgctcatatgcaggcagctacagtatgatattcggcgga

SEQ ID NO: 2272 - protein, 43 aa, Artificial Sequence
  Description of Artificial Sequence: Synthetic antibody
PDRFSGSKSGNTASLTISGLQAEDEADYYCCSYAGSYSMIFGG

SEQ ID NO: 2273 - DNA, 129 bp, Artificial Sequence
  Description of Artificial Sequence: Synthetic antibody
cctaatcgcttctctggctccaagtctggcaacacggcctccctgaccatctctgggctccaggctgaggatgaggctgattattactgctgctcatatgcaggcagctacagcatgatattcggcgga

SEQ ID NO: 2274 - protein, 43 aa, Artificial Sequence
  Description of Artificial Sequence: Synthetic antibody
PNRFSGSKSGNTASLTISGLQAEDEADYYCCSYAGSYSMIFGG

SEQ ID NO: 2275 - DNA, 129 bp, Artificial Sequence
  Description of Artificial Sequence: Synthetic antibody
ccgtttcgcttctctggctccaagtctggcaacacggcctccctgaccatctctgggctccaggctgaggatgaggctgattattactgctgctcatatgcaggcagctacagtatgatattcggcgga

SEQ ID NO: 2276 - protein, 43 aa, Artificial Sequence
  Description of Artificial Sequence: Synthetic antibody
PFRFSGSKSGNTASLTISGLQAEDEADYYCCSYAGSYSMIFGG

SEQ ID NO: 2277 - protein, 11 aa, Artificial Sequence
  Description of Artificial Sequence: Synthetic antibody
CSYAGSSTSVF

SEQ ID NO: 2278 - DNA, 129 bp, Artificial Sequence
  Description of Artificial Sequence: Synthetic antibody
ttctatcgcttctctggctccaagtctggcaacacggcctccctgacaatctctgggctccaggctgaggacgaggctgattattactgctgctcatatgcaggtagtagcacttccgtattcggcgga

SEQ ID NO: 2279 - protein, 43 aa, Artificial Sequence
  Description of Artificial Sequence: Synthetic antibody
FYRFSGSKSGNTASLTISGLQAEDEADYYCCSYAGSSTSVFGG

SEQ ID NO: 2280 - DNA, 129 bp, Artificial Sequence
  Description of Artificial Sequence: Synthetic antibody
tctaatcgcttctctggctccaagtctggcaacacggcctccctgacaatctctgggctccaggctgaggacgaggctgattattactgctgctcatatgcaggtagtagcacttccgtattcggcgga

SEQ ID NO: 2281 - protein, 43 aa, Artificial Sequence
  Description of Artificial Sequence: Synthetic antibody
SNRFSGSKSGNTASLTISGLQAEDEADYYCCSYAGSSTSVFGG

SEQ ID NO: 2282 - DNA, 129 bp, Artificial Sequence
  Description of Artificial Sequence: Synthetic antibody
ctaatccgcttctctggctccaagtctggcaacacggcctccctgacaatctctgggctccaggctgaggacgaggctgattattactgctgctcatatgcaggtagtagcacttccgtattcggcgga

SEQ ID NO: 2283 - protein, 43 aa, Artificial Sequence
  Description of Artificial Sequence: Synthetic antibody
LIRFSGSKSGNTASLTISGLQAEDEADYYCCSYAGSSTSVFGG

SEQ ID NO: 2284 - protein, 11 aa, Artificial Sequence
  Description of Artificial Sequence: Synthetic antibody
CSYAVTNSFLF

SEQ ID NO: 2285 - DNA, 129 bp, Artificial Sequence
  Description of Artificial Sequence: Synthetic antibody
cctgttcgcttctctggctccaagtctggcaactcggcctccctgaccatctctgggctccaggctgaagatgaggctgattattactgctgctcatatgcagtcaccaacagttttctcttcggaact

SEQ ID NO: 2286 - protein, 43 aa, Artificial Sequence
  Description of Artificial Sequence: Synthetic antibody
PVRFSGSKSGNSASLTISGLQAEDEADYYCCSYAVTNSFLFGT

SEQ ID NO: 2287 - DNA, 129 bp, Artificial Sequence
  Description of Artificial Sequence: Synthetic antibody
cctgatcgcttctctggctccaagtctggcaacacggcctccctgaccatctcttggctccagtctgaagatgaggctgattattactgctgctcatatgcagtcaccaacagttttctcttcggaact

SEQ ID NO: 2288 - protein, 43 aa, Artificial Sequence
  Description of Artificial Sequence: Synthetic antibody
PDRFSGSKSGNTASLTISWLQSEDEADYYCCSYAVTNSFLFGT

SEQ ID NO: 2289 - DNA, 129 bp, Artificial Sequence
  Description of Artificial Sequence: Synthetic antibody
cctgatcgcttctctggctccaagtctggcaacacggcctccctgaccatctctgggctccaggctgaagatgaggctgattattactgctgctcatatgcagtcaccaacagttttctcttcggaact

SEQ ID NO: 2290 - protein, 43 aa, Artificial Sequence
  Description of Artificial Sequence: Synthetic antibody
PDRFSGSKSGNTASLTISGLQAEDEADYYCCSYAVTNSFLFGT

SEQ ID NO: 2291 - protein, 12 aa, Artificial Sequence
  Description of Artificial Sequence: Synthetic antibody
CSYSSSSTLVVF

SEQ ID NO: 2292 - DNA, 129 bp, Artificial Sequence
  Description of Artificial Sequence: Synthetic antibody
tatcgattctctggctccaagtctggcaacacggcctccctgaccatctctgggctccaggctgaggacgaggctgattattactgctgctcatattcaagcagcagcactctcgtagtattcggcgga

SEQ ID NO: 2293 - protein, 43 aa, Artificial Sequence
  Description of Artificial Sequence: Synthetic antibody
YRFSGSKSGNTASLTISGLQAEDEADYYCCSYSSSSTLVVFGG

SEQ ID NO: 2294 - DNA, 129 bp, Artificial Sequence
  Description of Artificial Sequence: Synthetic antibody
aatcgcttctctggctccaagtctggcaacacggcctccctgaccatctctgggctccaggctgaggacgaggctgattattactgctgctcatattcaagcagcagcactctcgtagtattcggcgga

SEQ ID NO: 2295 - protein, 43 aa, Artificial Sequence
  Description of Artificial Sequence: Synthetic antibody
NRFSGSKSGNTASLTISGLQAEDEADYYCCSYSSSSTLVVFGG

SEQ ID NO: 2296 - DNA, 129 bp, Artificial Sequence
  Description of Artificial Sequence: Synthetic antibody
attcgcttctctggctccaagtctggcaacacggcctccctgaccatctctgggctccaggctgaggacgaggctgattattactgctgctcatattcaagcagcagcactctcgtagtattcggcgga

SEQ ID NO: 2297 - protein, 43 aa, Artificial Sequence
  Description of Artificial Sequence: Synthetic antibody
IRFSGSKSGNTASLTISGLQAEDEADYYCCSYSSSSTLVVFGG

SEQ ID NO: 2298 - DNA, 129 bp, Artificial Sequence
  Description of Artificial Sequence: Synthetic antibody
tctggtcgcttgtctggctccaagtcttgctacacggcctccctgacaatctctgggctccaggcagaggacgaggctgattattactgctgctcatatgcaggcagtagcactttgttgttcggcgga

SEQ ID NO: 2299 - protein, 43 aa, Artificial Sequence
  Description of Artificial Sequence: Synthetic antibody
SGRLSGSKSCYTASLTISGLQAEDEADYYCCSYAGSSTLLFGG

SEQ ID NO: 2300 - DNA, 129 bp, Artificial Sequence
  Description of Artificial Sequence: Synthetic antibody
tctggtcgcttgtctggctccaagtctggcaacacggcctccctgacaatctctgggctccaggcagaggacgaggctgattattactgctgctcatatgcaggcagtagcactttgttgttcggcgga

SEQ ID NO: 2301 - protein, 43 aa, Artificial Sequence
  Description of Artificial Sequence: Synthetic antibody
SGRLSGSKSGNTASLTISGLQAEDEADYYCCSYAGSSTLLFGG

SEQ ID NO: 2302 - DNA, 129 bp, Artificial Sequence
  Description of Artificial Sequence: Synthetic antibody
tctggtcgcttgtctggctccaagtctggcaacacggcctccctgacaatctctgggctccaggcagaggacgaggctgattattactgctgctcatatgcaggcagcagcactttgttgttcggccga

SEQ ID NO: 2303 - protein, 43 aa, Artificial Sequence
  Description of Artificial Sequence: Synthetic antibody
SGRLSGSKSGNTASLTISGLQAEDEADYYCCSYAGSSTLLFGR

SEQ ID NO: 2304 - protein, 11 aa, Artificial Sequence
  Description of Artificial Sequence: Synthetic antibody
CSYGDTSPVIF

SEQ ID NO: 2305 - DNA, 129 bp, Artificial Sequence
  Description of Artificial Sequence: Synthetic antibody
tctgatcgcttctctgtctccaagtctggcaatacggcctcccttgcaatctcttggctccagactgaggacgaggctgattatttctgctgctcatatggagatactagccccgtgatattcggcgga

SEQ ID NO: 2306 - protein, 43 aa, Artificial Sequence
  Description of Artificial Sequence: Synthetic antibody
SDRFSVSKSGNTASLAISWLQTEDEADYFCCSYGDTSPVIFGG

SEQ ID NO: 2307 - DNA, 129 bp, Artificial Sequence
  Description of Artificial Sequence: Synthetic antibody
tctgatcgcttctctggctccaagtctggcaatacggcctccctggcaatctctgggctccagactgaggacgaggctgattatttctgctgctcatatggagatactagccccgtgatattcggcgga

SEQ ID NO: 2308 - protein, 43 aa, Artificial Sequence
  Description of Artificial Sequence: Synthetic antibody
SDRFSGSKSGNTASLAISGLQTEDEADYFCCSYGDTSPVIFGG

SEQ ID NO: 2309 - DNA, 129 bp, Artificial Sequence
  Description of Artificial Sequence: Synthetic antibody
ctgatccgcttctctggctccaagtctggcaatacggcctccctggcaatctctgggctccagactgaggacgaggctgattatttctgctgctcatatggagatactagccccgtgatattcggcgga

SEQ ID NO: 2310 - protein, 43 aa, Artificial Sequence
  Description of Artificial Sequence: Synthetic antibody
LIRFSGSKSGNTASLAISGLQTEDEADYFCCSYGDTSPVIFGG

SEQ ID NO: 2311 - protein, 10 aa, Artificial Sequence
  Description of Artificial Sequence: Synthetic antibody
CSYATGFYVF

SEQ ID NO: 2312 - DNA, 129 bp, Artificial Sequence
  Description of Artificial Sequence: Synthetic antibody
ttttctaatcgcttctctggctccaagtctgacaacacggcctccctgacaatctctgggctccagactgaggacgaggctgactatcactgctgctcatatgcaactggtttttatgtcttcggagct

SEQ ID NO: 2313 - protein, 43 aa, Artificial Sequence
  Description of Artificial Sequence: Synthetic antibody
FSNRFSGSKSDNTASLTISGLQTEDEADYHCCSYATGFYVFGA

SEQ ID NO: 2314 - DNA, 129 bp, Artificial Sequence
  Description of Artificial Sequence: Synthetic antibody
atttctaatcgcttctctggctccaagtctgacaacacggcctccctgacaatctctgggctccagactgaggacgaggctgactatcactgctgctcatatgcaactggtttttatgtcttcggagct

SEQ ID NO: 2315 - protein, 43 aa, Artificial Sequence
  Description of Artificial Sequence: Synthetic antibody
ISNRFSGSKSDNTASLTISGLQTEDEADYHCCSYATGFYVFGA

SEQ ID NO: 2316 - DNA, 129 bp, Artificial Sequence
  Description of Artificial Sequence: Synthetic antibody
atatctactcgcttctctggctccaagtctgacaacacggcctccctgacaatctctgggctccagactgaggacgaggctgactatcactgctgctcatatgcaactggtttttatgtcttcggagct

SEQ ID NO: 2317 - protein, 43 aa, Artificial Sequence
  Description of Artificial Sequence: Synthetic antibody
ISTRFSGSKSDNTASLTISGLQTEDEADYHCCSYATGFYVFGA

SEQ ID NO: 2318 - protein, 12 aa, Artificial Sequence
  Description of Artificial Sequence: Synthetic antibody
CSYAGSSSYVVF

SEQ ID NO: 2319 - DNA, 129 bp, Artificial Sequence
  Description of Artificial Sequence: Synthetic antibody
tatcgcttctctggctccaagtctggcaacacggcctccctgactatctctgggctccaggctgaggacgaggctgattattactgctgctcatatgcaggtagtagctcatatgtggtattcggcgga

SEQ ID NO: 2320 - protein, 43 aa, Artificial Sequence
  Description of Artificial Sequence: Synthetic antibody
YRFSGSKSGNTASLTISGLQAEDEADYYCCSYAGSSSYVVFGG

SEQ ID NO: 2321 - DNA, 129 bp, Artificial Sequence
  Description of Artificial Sequence: Synthetic antibody
aatcgcttctctggctccatgtctggcaacacggcctccctgacaatctctgggctccaggctgaggacgaggctgattattactgctgctcatatgcaggtagtagctcttatgtggtattcggcgga

SEQ ID NO: 2322 - protein, 43 aa, Artificial Sequence
  Description of Artificial Sequence: Synthetic antibody
NRFSGSMSGNTASLTISGLQAEDEADYYCCSYAGSSSYVVFGG

SEQ ID NO: 2323 - DNA, 129 bp, Artificial Sequence
  Description of Artificial Sequence: Synthetic antibody
aatcgcttctctggctccaagtctggcaacacggcctccctgtcaatctctgggctccaggctgaggacgaggctgattattactgctgctcatatgcaggtagtagctcttatgtggtattcggcgga

SEQ ID NO: 2324 - protein, 43 aa, Artificial Sequence
  Description of Artificial Sequence: Synthetic antibody
NRFSGSKSGNTASLSISGLQAEDEADYYCCSYAGSSSYVVFGG

SEQ ID NO: 2325 - protein, 10 aa, Artificial Sequence
  Description of Artificial Sequence: Synthetic antibody
CSYAGNLWLF

SEQ ID NO: 2326 - DNA, 129 bp, Artificial Sequence
  Description of Artificial Sequence: Synthetic antibody
gtccctgatcgcttctctggctcgaagtctggcaacacggcctccctgaccatctcttggctccaggctgaggatgaggctgattattactgttgctcatatgcaggcaacctctggctgttcggcgga

SEQ ID NO: 2327 - protein, 43 aa, Artificial Sequence
  Description of Artificial Sequence: Synthetic antibody
VPDRFSGSKSGNTASLTISWLQAEDEADYYCCSYAGNLWLFGG

SEQ ID NO: 2328 - DNA, 129 bp, Artificial Sequence
  Description of Artificial Sequence: Synthetic antibody
gtccctgatcgcttctctggctccaagtctggcaacacggcctccctgaccatctctgggctccaggctgaggatgaggctgattattactgttgctcatatgcaggcaacctctggctgttcggcgga

SEQ ID NO: 2329 - protein, 43 aa, Artificial Sequence
  Description of Artificial Sequence: Synthetic antibody
VPDRFSGSKSGNTASLTISGLQAEDEADYYCCSYAGNLWLFGG

SEQ ID NO: 2330 - DNA, 129 bp, Artificial Sequence
  Description of Artificial Sequence: Synthetic antibody
ggccctgatcgcttctctggctccaaggctggcaacacggcctccctgaccatctctgggctccaggctgaggatgaggctgattattactgttgctcatatgcaggcaacctctggctgttcggcgga

SEQ ID NO: 2331 - protein, 43 aa, Artificial Sequence
  Description of Artificial Sequence: Synthetic antibody
GPDRFSGSKAGNTASLTISGLQAEDEADYYCCSYAGNLWLFGG

SEQ ID NO: 2332 - protein, 9 aa, Artificial Sequence
  Description of Artificial Sequence: Synthetic antibody
CSYAGTVVF

SEQ ID NO: 2333 - DNA, 129 bp, Artificial Sequence
  Description of Artificial Sequence: Synthetic antibody
ggtgtccctgatcgcttctctggctccaagtctggcaacacggcctccctgaccatctcttggctccaggctgaggatgaggctgattattactgctgctcatatgcaggcactgtggtattcggcgga

SEQ ID NO: 2334 - protein, 43 aa, Artificial Sequence
  Description of Artificial Sequence: Synthetic antibody
GVPDRFSGSKSGNTASLTISWLQAEDEADYYCCSYAGTVVFGG

SEQ ID NO: 2335 - DNA, 129 bp, Artificial Sequence
  Description of Artificial Sequence: Synthetic antibody
ggggtccctgatcgcttctctggctccaagtctggcaacacggcctccctgaccatctctgggctccaggctgaggatgaggctgattattactgctgctcatatgcaggcactgtggtattcggcgga

SEQ ID NO: 2336 - protein, 43 aa, Artificial Sequence
  Description of Artificial Sequence: Synthetic antibody
GVPDRFSGSKSGNTASLTISGLQAEDEADYYCCSYAGTVVFGG

SEQ ID NO: 2337 - DNA, 129 bp, Artificial Sequence
  Description of Artificial Sequence: Synthetic antibody
ggggtccctaatcgcttctctggctccaagtctggcgacacggcctccctgaccatctctgggctccaggctgaggatgaggctgattattactgctgctcatatgcaggcactgtggtattcggcgga

SEQ ID NO: 2338 - protein, 43 aa, Artificial Sequence
  Description of Artificial Sequence: Synthetic antibody
GVPNRFSGSKSGDTASLTISGLQAEDEADYYCCSYAGTVVFGG

SEQ ID NO: 2339 - protein, 11 aa, Artificial Sequence
  Description of Artificial Sequence: Synthetic antibody
CSYAGSSSWVF

SEQ ID NO: 2340 - DNA, 129 bp, Artificial Sequence
  Description of Artificial Sequence: Synthetic antibody
tctaatcgcttctctggctccaagtctggtagcacggcctccctgacaatctctgggctccaggctgaggacgaggctgattattactgctgctcatatgcaggtagtagctcttgggtgttcggcgga

SEQ ID NO: 2341 - protein, 43 aa, Artificial Sequence
  Description of Artificial Sequence: Synthetic antibody
SNRFSGSKSGSTASLTISGLQAEDEADYYCCSYAGSSSWVFGG

SEQ ID NO: 2342 - DNA, 129 bp, Artificial Sequence
  Description of Artificial Sequence: Synthetic antibody
tctaatcgcttctctggctccaagtctggcaacacggcctccctgacaatctctgggctccaggctgaggacgaggctgattattactgctgctcatatgcaggtagtagctcttgggtgttcggcgga

SEQ ID NO: 2343 - protein, 43 aa, Artificial Sequence
  Description of Artificial Sequence: Synthetic antibody
SNRFSGSKSGNTASLTISGLQAEDEADYYCCSYAGSSSWVFGG

SEQ ID NO: 2344 - DNA, 129 bp, Artificial Sequence
  Description of Artificial Sequence: Synthetic antibody
ctaatccgcttctctggctccaagtctggcaacacggcctccctgacaatctctgggctccaggctgaggacgaggctgattattactgctgctcatatgcaggtagtagctcttgggtgttcggcgga

SEQ ID NO: 2345 - protein, 43 aa, Artificial Sequence
  Description of Artificial Sequence: Synthetic antibody
LIRFSGSKSGNTASLTISGLQAEDEADYYCCSYAGSSSWVFGG

SEQ ID NO: 2346 - protein, 11 aa, Artificial Sequence
  Description of Artificial Sequence: Synthetic antibody
CSYAGSSNWVF

SEQ ID NO: 2347 - DNA, 129 bp, Artificial Sequence
  Description of Artificial Sequence: Synthetic antibody
tctattcgcttctctggctccaagtctggctacacggcctccctgacaatctctgggctccaggctgaggacgaggctgattattactgctgctcatatgcaggtagtagcaattgggtgttcggcgga

SEQ ID NO: 2348 - protein, 43 aa, Artificial Sequence
  Description of Artificial Sequence: Synthetic antibody
SIRFSGSKSGYTASLTISGLQAEDEADYYCCSYAGSSNWVFGG

SEQ ID NO: 2349 - DNA, 129 bp, Artificial Sequence
  Description of Artificial Sequence: Synthetic antibody
tctattcgcttctctggctccaagtctggcaacacggcctcgctgacaatctctgggctccaggctgaggacgaggctgattattactgctgctcatatgcaggtagtagcaattgggtgttcggcgga

SEQ ID NO: 2350 - protein, 43 aa, Artificial Sequence
  Description of Artificial Sequence: Synthetic antibody
SIRFSGSKSGNTASLTISGLQAEDEADYYCCSYAGSSNWVFGG

SEQ ID NO: 2351 - DNA, 129 bp, Artificial Sequence
  Description of Artificial Sequence: Synthetic antibody
tctaatcgcttctctggctccaagtctggcaacacggcctccctgacaatctctgggctccaggctgaggacgaggctgattattactgctgctcatatgcaggtagtagcaattgggtgttcggcgga

SEQ ID NO: 2352 - protein, 43 aa, Artificial Sequence
  Description of Artificial Sequence: Synthetic antibody
SNRFSGSKSGNTASLTISGLQAEDEADYYCCSYAGSSNWVFGG

SEQ ID NO: 2353 - protein, 11 aa, Artificial Sequence
  Description of Artificial Sequence: Synthetic antibody
CSYAGSSPVVF

SEQ ID NO: 2354 - DNA, 129 bp, Artificial Sequence
  Description of Artificial Sequence: Synthetic antibody
ttctatcgcttctctggctccaagtctggcaacacggcctccctgacaatctctgggctccaggctgaggacgaggctgattattactgctgctcatatgcaggtagtagccctgtggtattcggcgga

SEQ ID NO: 2355 - protein, 43 aa, Artificial Sequence
  Description of Artificial Sequence: Synthetic antibody
FYRFSGSKSGNTASLTISGLQAEDEADYYCCSYAGSSPVVFGG

SEQ ID NO: 2356 - DNA, 129 bp, Artificial Sequence
  Description of Artificial Sequence: Synthetic antibody
tctaatcgcttctctggctccaagtctggcaacacggcctccctgacaatctctgggctccaggctgaggacgaggctgattattactgctgctcatatgcaggtagtagccctgtggtattcggcgga

SEQ ID NO: 2357 - protein, 43 aa, Artificial Sequence
  Description of Artificial Sequence: Synthetic antibody
SNRFSGSKSGNTASLTISGLQAEDEADYYCCSYAGSSPVVFGG

SEQ ID NO: 2358 - DNA, 129 bp, Artificial Sequence
  Description of Artificial Sequence: Synthetic antibody
ctaatccgcttctctggctccaagtctggcaacacggcctccctgacaatctctgggctccaggctgaggacgaggctgattattactgctgctcatatgcaggtagtagccctgtggtattcggcgga

SEQ ID NO: 2359 - protein, 43 aa, Artificial Sequence
  Description of Artificial Sequence: Synthetic antibody
LIRFSGSKSGNTASLTISGLQAEDEADYYCCSYAGSSPVVFGG

SEQ ID NO: 2360 - protein, 10 aa, Artificial Sequence
  Description of Artificial Sequence: Synthetic antibody
CSYTGTYVIF

SEQ ID NO: 2361 - DNA, 129 bp, Artificial Sequence
  Description of Artificial Sequence: Synthetic antibody
gtccctgatcgcttctctggctccaagtctgtcaacacggcctccctgaccatctctgggctccaggctgaggatgaggctgattattactgctgctcatataccggcacctatgtgatattccgcgga

SEQ ID NO: 2362 - protein, 43 aa, Artificial Sequence
  Description of Artificial Sequence: Synthetic antibody
VPDRFSGSKSVNTASLTISGLQAEDEADYYCCSYTGTYVIFRG

SEQ ID NO: 2363 - DNA, 129 bp, Artificial Sequence
  Description of Artificial Sequence: Synthetic antibody
gtccctgatcgcttctctggctccaagtctgtcaacacggcctccctgaccatctctgggctccaggctgaggatgaggctgattattactgctgctcatatacaggcacctatgtgatattcggcgga

SEQ ID NO: 2364 - protein, 43 aa, Artificial Sequence
  Description of Artificial Sequence: Synthetic antibody
VPDRFSGSKSVNTASLTISGLQAEDEADYYCCSYTGTYVIFGG

SEQ ID NO: 2365 - DNA, 129 bp, Artificial Sequence
  Description of Artificial Sequence: Synthetic antibody
ggtcctgatcgcttctctggctccaagtctgtcaacacggcctccctgaccatctctgggctccaggctgaggatgaggctgattattactgctgctcatatacaggcacctatgtgatattcggcgga

SEQ ID NO: 2366 - protein, 43 aa, Artificial Sequence
  Description of Artificial Sequence: Synthetic antibody
GPDRFSGSKSVNTASLTISGLQAEDEADYYCCSYTGTYVIFGG

SEQ ID NO: 2367 - DNA, 129 bp, Artificial Sequence
  Description of Artificial Sequence: Synthetic antibody
cctgatcgcttctctggctccaagtctggcatcacggcctccctgaccatctctgggctccaggctgaggatgagtctgattattactgctgctcatatgcaggcagctacacttttgtcttcggaact

SEQ ID NO: 2368 - protein, 43 aa, Artificial Sequence
  Description of Artificial Sequence: Synthetic antibody
PDRFSGSKSGITASLTISGLQAEDESDYYCCSYAGSYTFVFGT

SEQ ID NO: 2369 - DNA, 129 bp, Artificial Sequence
  Description of Artificial Sequence: Synthetic antibody
cctgatcgcttctctggctccaagtctggcaacacggcctccctgaccatctctgggctccgggctgaagatgaggctgattattactgctgctcatatgcaggcagctacacttttgtcttcggaact

SEQ ID NO: 2370 - protein, 43 aa, Artificial Sequence
  Description of Artificial Sequence: Synthetic antibody
PDRFSGSKSGNTASLTISGLRAEDEADYYCCSYAGSYTFVFGT

SEQ ID NO: 2371 - DNA, 129 bp, Artificial Sequence
  Description of Artificial Sequence: Synthetic antibody
cctgatcgcttctctggctccaagtctggcaacacggcctccctgaccatctctgggctccaggctgaggatgaggctgattattactgctgctcatatgcaggcagctacacttttgtcttcggaact

SEQ ID NO: 2372 - protein, 43 aa, Artificial Sequence
  Description of Artificial Sequence: Synthetic antibody
PDRFSGSKSGNTASLTISGLQAEDEADYYCCSYAGSYTFVFGT

SEQ ID NO: 2373 - protein, 11 aa, Artificial Sequence
  Description of Artificial Sequence: Synthetic antibody
CSYAGSTTLLF

SEQ ID NO: 2374 - DNA, 129 bp, Artificial Sequence
  Description of Artificial Sequence: Synthetic antibody
tctaatcgcttctctggctccaagtctggcagctcggcctccctgacattctctgggctccaggctgaggacgaggctgattattactgctgctcatatgcaggtagtaccactttactgttcggcgga

SEQ ID NO: 2375 - protein, 43 aa, Artificial Sequence
  Description of Artificial Sequence: Synthetic antibody
SNRFSGSKSGSSASLTFSGLQAEDEADYYCCSYAGSTTLLFGG

SEQ ID NO: 2376 - DNA, 129 bp, Artificial Sequence
  Description of Artificial Sequence: Synthetic antibody
tctaatcgcttctctggctccaagtctggcagcacggcctccctgacaatctctgggctccaggctgaggacgaggctgattattactgctgctcatatgcaggtagtaccactttactgttcggcgga

SEQ ID NO: 2377 - protein, 43 aa, Artificial Sequence
  Description of Artificial Sequence: Synthetic antibody
SNRFSGSKSGSTASLTISGLQAEDEADYYCCSYAGSTTLLFGG

SEQ ID NO: 2378 - DNA, 129 bp, Artificial Sequence
  Description of Artificial Sequence: Synthetic antibody
tctaatcgcttctctggctccaagtctggcagcacggcctccctgacaatctctgggatccaggccgaggacgaggctgattattactgctgctcatatgcaggtagtaccactttactgttcggcgga

SEQ ID NO: 2379 - protein, 43 aa, Artificial Sequence
  Description of Artificial Sequence: Synthetic antibody
SNRFSGSKSGSTASLTISGIQAEDEADYYCCSYAGSTTLLFGG

SEQ ID NO: 2380 - protein, 11 aa, Artificial Sequence
  Description of Artificial Sequence: Synthetic antibody
CSYAGSTTLVF

SEQ ID NO: 2381 - DNA, 129 bp, Artificial Sequence
  Description of Artificial Sequence: Synthetic antibody
tctaatcgcttctctggctccaagtctggcaacacggcctccctgacaatctctgggctccaggctgaggacgaggctgattattactgctgctcatatgcaggtagtaccactttggtattcggcggc

SEQ ID NO: 2382 - protein, 43 aa, Artificial Sequence
  Description of Artificial Sequence: Synthetic antibody
SNRFSGSKSGNTASLTISGLQAEDEADYYCCSYAGSTTLVFGG

SEQ ID NO: 2383 - DNA, 129 bp, Artificial Sequence
  Description of Artificial Sequence: Synthetic antibody
tctaatcgcttctctggctccaagtctggcaacacggcctccctgacaatctctgggctccaggctgaggacgaggctgattattactgctgctcatatgcaggtagtaccactttggtattcggcgga

SEQ ID NO: 2384 - DNA, 129 bp, Artificial Sequence
  Description of Artificial Sequence: Synthetic antibody
cctaatcgcttctctggctccaagtctggcaacacggcctccctgacaatctctgggctccaggctggggacgaggctgattattactgctgctcatatgcaggtagtaccactttggtattcggcgga

SEQ ID NO: 2385 - protein, 43 aa, Artificial Sequence
  Description of Artificial Sequence: Synthetic antibody
PNRFSGSKSGNTASLTISGLQAGDEADYYCCSYAGSTTLVFGG

SEQ ID NO: 2386 - protein, 11 aa, Artificial Sequence
  Description of Artificial Sequence: Synthetic antibody
CSYAGSYSVVF

SEQ ID NO: 2387 - DNA, 129 bp, Artificial Sequence
  Description of Artificial Sequence: Synthetic antibody
ctgatccgcttctctggctccaagtctggcaacacggcctccctgaccatctctgggctccaggctgaggatgaggctgattattactgctgctcatatgcaggcagctactccgtggtgttcggcgga

SEQ ID NO: 2388 - protein, 43 aa, Artificial Sequence
  Description of Artificial Sequence: Synthetic antibody
LIRFSGSKSGNTASLTISGLQAEDEADYYCCSYAGSYSVVFGG

SEQ ID NO: 2389 - DNA, 129 bp, Artificial Sequence
  Description of Artificial Sequence: Synthetic antibody
cctgatcgcttctctggctcgaagtctggcaactcggcctccctgaccatctctgggctccaggctgaggatgaggctgattattactgctgctcatatgcaggcagctactccgtggtgttcggcgga

SEQ ID NO: 2390 - protein, 43 aa, Artificial Sequence
  Description of Artificial Sequence: Synthetic antibody
PDRFSGSKSGNSASLTISGLQAEDEADYYCCSYAGSYSVVFGG

SEQ ID NO: 2391 - DNA, 129 bp, Artificial Sequence
  Description of Artificial Sequence: Synthetic antibody
cctgatcgcttctctggctccaagtctggcaacacggcctccctgaccatctctgggctccaggctgaggatgaggctgattattactgctgctcatatgcaggcagctactccgtggtgttcggcgga

SEQ ID NO: 2392 - protein, 43 aa, Artificial Sequence
  Description of Artificial Sequence: Synthetic antibody
PDRFSGSKSGNTASLTISGLQAEDEADYYCCSYAGSYSVVFGG

SEQ ID NO: 2393 - protein, 11 aa, Artificial Sequence
  Description of Artificial Sequence: Synthetic antibody
CSYAGSYFWVF

SEQ ID NO: 2394 - DNA, 129 bp, Artificial Sequence
  Description of Artificial Sequence: Synthetic antibody
cctgatcgcttctctggctccaagtctggcgacacggcctccctgaccatctctgggctccaggctgaggatgaggctgattattattgctgctcatatgcaggcagctacttctgggtgttcggcgga

SEQ ID NO: 2395 - protein, 43 aa, Artificial Sequence
  Description of Artificial Sequence: Synthetic antibody
PDRFSGSKSGDTASLTISGLQAEDEADYYCCSYAGSYFWVFGG

SEQ ID NO: 2396 - DNA, 129 bp, Artificial Sequence
  Description of Artificial Sequence: Synthetic antibody
cctgatcgcttctctggctccaagtctggcaacacggcctccctgaccatctctgggctccaggctgaggatgaggctgattattactgctgctcatatgcaggcagctacttctgggtgttcggcgga

SEQ ID NO: 2397 - protein, 43 aa, Artificial Sequence
  Description of Artificial Sequence: Synthetic antibody
PDRFSGSKSGNTASLTISGLQAEDEADYYCCSYAGSYFWVFGG

SEQ ID NO: 2398 - DNA, 129 bp, Artificial Sequence
  Description of Artificial Sequence: Synthetic antibody
cctgatcgcttctctggctccaaggctggcaacacggcctccctgaccatctctgggctccaggctgaggatggggctgattattactgctgctcatatgcaggcagctacttctgggtgttcggcgga

SEQ ID NO: 2399 - protein, 43 aa, Artificial Sequence
  Description of Artificial Sequence: Synthetic antibody
PDRFSGSKAGNTASLTISGLQAEDGADYYCCSYAGSYFWVFGG

SEQ ID NO: 2400 - protein, 11 aa, Artificial Sequence
  Description of Artificial Sequence: Synthetic antibody
CSYAGSGSYVF

SEQ ID NO: 2401 - DNA, 129 bp, Artificial Sequence
  Description of Artificial Sequence: Synthetic antibody
tctgttcgcttctctgcctccaagtctggcaacacggcctccctgacaatctctgggctccaggctgaggacgaggctgatttttactgttgctcatatgcaggtagtggctcttatgtcttcggaact

SEQ ID NO: 2402 - protein, 43 aa, Artificial Sequence
  Description of Artificial Sequence: Synthetic antibody
SVRFSASKSGNTASLTISGLQAEDEADFYCCSYAGSGSYVFGT

SEQ ID NO: 2403 - DNA, 129 bp, Artificial Sequence
  Description of Artificial Sequence: Synthetic antibody
tctgatcgcttctctgcctccaagtctggcaacacggcctccctgacaatctctgggctccaggctgaggacgaggctgattattactgttgctcatatgcaggtagtggctcttatgtcttcggaact

SEQ ID NO: 2404 - protein, 43 aa, Artificial Sequence
  Description of Artificial Sequence: Synthetic antibody
SDRFSASKSGNTASLTISGLQAEDEADYYCCSYAGSGSYVFGT

SEQ ID NO: 2405 - DNA, 129 bp, Artificial Sequence
  Description of Artificial Sequence: Synthetic antibody
tctgatcgcttctctgcctccaagtctggcaacacggcctccctgacaatctccgggctccaggctgaggacgaggctgattattactgttgctcatatgcaggtagtggctcttatgtcttcggaact

SEQ ID NO: 2406 - protein, 11 aa, Artificial Sequence
  Description of Artificial Sequence: Synthetic antibody
CSYAGSYPVVF

SEQ ID NO: 2407 - DNA, 129 bp, Artificial Sequence
  Description of Artificial Sequence: Synthetic antibody
tctaatcgcttctctggctccaagtctggcaacacggcctccctgaccatctctgggctccaggctgaggatgaggctgattattactgctgctcatatgcaggcagctaccccgtggtattcggcgga

SEQ ID NO: 2408 - protein, 43 aa, Artificial Sequence
  Description of Artificial Sequence: Synthetic antibody
SNRFSGSKSGNTASLTISGLQAEDEADYYCCSYAGSYPVVFGG

SEQ ID NO: 2409 - DNA, 129 bp, Artificial Sequence
  Description of Artificial Sequence: Synthetic antibody
cctgatcgcttctctggctccaagtctggcaacacggcctccctgaccatctcttggctccagtctgaggatgaggctgattattactgctgctcatatgcaggcagctaccccgtggtattcggcgga

SEQ ID NO: 2410 - protein, 43 aa, Artificial Sequence
  Description of Artificial Sequence: Synthetic antibody
PDRFSGSKSGNTASLTISWLQSEDEADYYCCSYAGSYPVVFGG

SEQ ID NO: 2411 - DNA, 129 bp, Artificial Sequence
  Description of Artificial Sequence: Synthetic antibody
cctgatcgcttctctggctccaagtctggcaacacggcctccctgaccatctctgggctccaggctgaggatgaggctgattattactgctgctcatatgcaggcagctaccccgtggtattcggcgga

SEQ ID NO: 2412 - protein, 43 aa, Artificial Sequence
  Description of Artificial Sequence: Synthetic antibody
PDRFSGSKSGNTASLTISGLQAEDEADYYCCSYAGSYPVVFGG

SEQ ID NO: 2413 - protein, 12 aa, Artificial Sequence
  Description of Artificial Sequence: Synthetic antibody
CSYAGSSTDVVF

SEQ ID NO: 2414 - DNA, 129 bp, Artificial Sequence
  Description of Artificial Sequence: Synthetic antibody
actcgcttctctggctccaagtctggcaacacggcctccctgactatctctgggctccaggctgaggacgaggctgattattactgctgctcatatgcaggtagtagcacggatgtggtattcggcgga

SEQ ID NO: 2415 - protein, 43 aa, Artificial Sequence
  Description of Artificial Sequence: Synthetic antibody
TRFSGSKSGNTASLTISGLQAEDEADYYCCSYAGSSTDVVFGG

SEQ ID NO: 2416 - DNA, 129 bp, Artificial Sequence
  Description of Artificial Sequence: Synthetic antibody
aatcgcttctctggctccaagtctggcaacacggcctccctgacaatctctgggctccaggctgaggacgaggctgattattactgctgctcatatgcaggtagtagcacggatgtggtattcggcgga

SEQ ID NO: 2417 - protein, 43 aa, Artificial Sequence
  Description of Artificial Sequence: Synthetic antibody
NRFSGSKSGNTASLTISGLQAEDEADYYCCSYAGSSTDVVFGG

SEQ ID NO: 2418 - DNA, 129 bp, Artificial Sequence
  Description of Artificial Sequence: Synthetic antibody
atacgcttctctggctccaagtctggcaacacggcctccctgacaatctctgggctccaggctgaggacgaggctgattattactgctgctcatatgcaggtagtagcacggatgtggtattcggcgga

SEQ ID NO: 2419 - protein, 43 aa, Artificial Sequence
  Description of Artificial Sequence: Synthetic antibody
IRFSGSKSGNTASLTISGLQAEDEADYYCCSYAGSSTDVVFGG

SEQ ID NO: 2420 - protein, 12 aa, Artificial Sequence
  Description of Artificial Sequence: Synthetic antibody
CSYAGSRGPYVF

SEQ ID NO: 2421 - DNA, 129 bp, Artificial Sequence
  Description of Artificial Sequence: Synthetic antibody
aatcgcttctctggctccaagtctggcaacacggcctccctgacaatctctgggctccaggctgaggacgaggctgattattactgctgctcatatgcaggtagtagagggccttatgtcttcggaact

SEQ ID NO: 2422 - protein, 43 aa, Artificial Sequence
  Description of Artificial Sequence: Synthetic antibody
NRFSGSKSGNTASLTISGLQAEDEADYYCCSYAGSRGPYVFGT

SEQ ID NO: 2423 - DNA, 129 bp, Artificial Sequence
  Description of Artificial Sequence: Synthetic antibody
atccgcttctctggctccaagtctggcaacacggcctccctgacaatctctgggctccaggctgaggacgaggctgattattactgctgctcatatgcaggtagtagagggccttatgtcttcggaact

SEQ ID NO: 2424 - protein, 43 aa, Artificial Sequence
  Description of Artificial Sequence: Synthetic antibody
IRFSGSKSGNTASLTISGLQAEDEADYYCCSYAGSRGPYVFGT

SEQ ID NO: 2425 - protein, 11 aa, Artificial Sequence
  Description of Artificial Sequence: Synthetic antibody
CSYAGSRTYVF

SEQ ID NO: 2426 - DNA, 129 bp, Artificial Sequence
  Description of Artificial Sequence: Synthetic antibody
tctaatcgcttctctggctccaagtctggcaacacggcctccctgacaatctctggcctccaggctgaggacgaggctgattattactgctgctcatatgcaggtagtcgcacttatgtcttcggaact

SEQ ID NO: 2427 - protein, 43 aa, Artificial Sequence
  Description of Artificial Sequence: Synthetic antibody
SNRFSGSKSGNTASLTISGLQAEDEADYYCCSYAGSRTYVFGT

SEQ ID NO: 2428 - DNA, 129 bp, Artificial Sequence
  Description of Artificial Sequence: Synthetic antibody
actgatcgcttctctggctccaagtctggcaacgcggcctccctgacaatctctgggctccaggctgaggacgaggctgattatttttgttgctcatatgcaggtagtagaacttatgtcttcggaact

SEQ ID NO: 2429 - protein, 43 aa, Artificial Sequence
  Description of Artificial Sequence: Synthetic antibody
TDRFSGSKSGNAASLTISGLQAEDEADYFCCSYAGSRTYVFGT

SEQ ID NO: 2430 - protein, 11 aa, Artificial Sequence
  Description of Artificial Sequence: Synthetic antibody
CSYAGSSSCVF

SEQ ID NO: 2431 - DNA, 129 bp, Artificial Sequence
  Description of Artificial Sequence: Synthetic antibody
tctaatcgcttctctggctcgaagtctggcaacacggcctccctgacaatctctgggctccaggctgaggacgaggctgattattactgctgctcatatgcaggtagtagctcttgtgtgttcggcgga

SEQ ID NO: 2432 - protein, 43 aa, Artificial Sequence
  Description of Artificial Sequence: Synthetic antibody
SNRFSGSKSGNTASLTISGLQAEDEADYYCCSYAGSSSCVFGG

SEQ ID NO: 2433 - DNA, 129 bp, Artificial Sequence
  Description of Artificial Sequence: Synthetic antibody
tctaatcgcttctctggctccatgtctggcaacacggcctccctgacaatctctgggctccaggctgaggacgaggctgattattactgctgctcatatgcaggtagtagctcttgtgtgttcggcgga

SEQ ID NO: 2434 - protein, 43 aa, Artificial Sequence
  Description of Artificial Sequence: Synthetic antibody
SNRFSGSMSGNTASLTISGLQAEDEADYYCCSYAGSSSCVFGG

SEQ ID NO: 2435 - protein, 11 aa, Artificial Sequence
  Description of Artificial Sequence: Synthetic antibody
CSYAGSYTNVF

SEQ ID NO: 2436 - DNA, 129 bp, Artificial Sequence
  Description of Artificial Sequence: Synthetic antibody
ctgatccgcttctctggctccaagtctggcaacacggcctccctgaccatctctgggctccaggctgaggatgaggctgattattactgctgctcatatgcaggcagctacactaacgtcttcggaact

SEQ ID NO: 2437 - protein, 43 aa, Artificial Sequence
  Description of Artificial Sequence: Synthetic antibody
LIRFSGSKSGNTASLTISGLQAEDEADYYCCSYAGSYTNVFGT

SEQ ID NO: 2438 - DNA, 129 bp, Artificial Sequence
  Description of Artificial Sequence: Synthetic antibody
cctgatcgcttctctggctccaagtctggcaacacggcctccctgaccatctctgggctccaggctgaggatgaggctgattattactgctgctcatatgcaggcagctacactaacgtcttcggaact

SEQ ID NO: 2439 - protein, 43 aa, Artificial Sequence
  Description of Artificial Sequence: Synthetic antibody
PDRFSGSKSGNTASLTISGLQAEDEADYYCCSYAGSYTNVFGT

SEQ ID NO: 2440 - protein, 12 aa, Artificial Sequence
  Description of Artificial Sequence: Synthetic antibody
CSYASDNSHVVI

SEQ ID NO: 2441 - DNA, 129 bp, Artificial Sequence
  Description of Artificial Sequence: Synthetic antibody
tatcggttctctgcctccaagtctggcaacgcggcctccctgacaatctctgggctccagactgaggacgaggctgattatttctgctgctcatatgcaagtgataactcccatgtggtgatcggcgga

SEQ ID NO: 2442 - protein, 43 aa, Artificial Sequence
  Description of Artificial Sequence: Synthetic antibody
YRFSASKSGNAASLTISGLQTEDEADYFCCSYASDNSHVVIGG

SEQ ID NO: 2443 - DNA, 129 bp, Artificial Sequence
  Description of Artificial Sequence: Synthetic antibody
aatcggttctctgcctccaagtctggcaacacggcctccctgacaatctctgggctccagactgaggacgaggctgattatttctgctgctcatatgcaagtgataactcccatgtggtgatcggcgga

SEQ ID NO: 2444 - protein, 43 aa, Artificial Sequence
  Description of Artificial Sequence: Synthetic antibody
NRFSASKSGNTASLTISGLQTEDEADYFCCSYASDNSHVVIGG

SEQ ID NO: 2445 - protein, 11 aa, Artificial Sequence
  Description of Artificial Sequence: Synthetic antibody
CSYAGYYTYVF

SEQ ID NO: 2446 - DNA, 129 bp, Artificial Sequence
  Description of Artificial Sequence: Synthetic antibody
ctgatccgcttctccggctccaagtctggcaacacggcctccctgaccatctctgggctccaggctgaggatgaggctgattattactgctgctcatatgcaggctactacacttatgtcttcggaact

SEQ ID NO: 2447 - protein, 43 aa, Artificial Sequence
  Description of Artificial Sequence: Synthetic antibody
LIRFSGSKSGNTASLTISGLQAEDEADYYCCSYAGYYTYVFGT

SEQ ID NO: 2448 - DNA, 129 bp, Artificial Sequence
  Description of Artificial Sequence: Synthetic antibody
cctgatcgcttctctggctccaagtctggcaacacggcctccctgaccatctctgggctccaggctgaggatgaggctgattattactgctgctcatatgcaggctactacacttatgtcttcggaact

SEQ ID NO: 2449 - protein, 43 aa, Artificial Sequence
  Description of Artificial Sequence: Synthetic antibody
PDRFSGSKSGNTASLTISGLQAEDEADYYCCSYAGYYTYVFGT

SEQ ID NO: 2450 - protein, 12 aa, Artificial Sequence
  Description of Artificial Sequence: Synthetic antibody
CSYAGSLTYVVF

SEQ ID NO: 2451 - DNA, 129 bp, Artificial Sequence
  Description of Artificial Sequence: Synthetic antibody
aatcgcttctctggctccttgtctggcaacacggccaccctgacaatctctgggctccaggctgaggacgagggtcattattactgctgctcatatgcaggtagtctcacttatgtggtcttcggcgga

SEQ ID NO: 2452 - protein, 43 aa, Artificial Sequence
  Description of Artificial Sequence: Synthetic antibody
NRFSGSLSGNTATLTISGLQAEDEGHYYCCSYAGSLTYVVFGG

SEQ ID NO: 2453 - DNA, 129 bp, Artificial Sequence
  Description of Artificial Sequence: Synthetic antibody
aatcgcttctctggctccaagtctggcaacacggccaccctgacaatctctgggctccaggctgaggacgagggtcattattactgctgctcatatgcaggtagtctcacttatgtggtcttcggcgga

SEQ ID NO: 2454 - protein, 43 aa, Artificial Sequence
  Description of Artificial Sequence: Synthetic antibody
NRFSGSKSGNTATLTISGLQAEDEGHYYCCSYAGSLTYVVFGG

SEQ ID NO: 2455 - protein, 11 aa, Artificial Sequence
  Description of Artificial Sequence: Synthetic antibody
CSYAGSSTFEF

SEQ ID NO: 2456 - DNA, 129 bp, Artificial Sequence
  Description of Artificial Sequence: Synthetic antibody
tctaatcgcttctctggctccaagtctggcaacacggcctccctgacaatctctgggctccaggctgaggacgaggctgattattactgctgctcatatgcaggtagtagcactttcgaattcggcgga

SEQ ID NO: 2457 - protein, 43 aa, Artificial Sequence
  Description of Artificial Sequence: Synthetic antibody
SNRFSGSKSGNTASLTISGLQAEDEADYYCCSYAGSSTFEFGG

SEQ ID NO: 2458 - DNA, 129 bp, Artificial Sequence
  Description of Artificial Sequence: Synthetic antibody
tctaatcgcttctctggatccaagtctggcaacactgcctccctgacaatctctgggctccaggctgaggacgaggctgattattactgctgctcatatgcaggtagtagcactttcgaattcggcgga

SEQ ID NO: 2459 - protein, 12 aa, Artificial Sequence
  Description of Artificial Sequence: Synthetic antibody
CSYAGSYSLVVF

SEQ ID NO: 2460 - DNA, 129 bp, Artificial Sequence
  Description of Artificial Sequence: Synthetic antibody
gatcgcttctctggctccaagtctggcaagacggcctccctgaccatctctgggctccaggctgaggatgaggctgattattactgctgctcatatgcaggcagctactctcttgtggtattcggcgga

SEQ ID NO: 2461 - protein, 43 aa, Artificial Sequence
  Description of Artificial Sequence: Synthetic antibody
DRFSGSKSGKTASLTISGLQAEDEADYYCCSYAGSYSLVVFGG

SEQ ID NO: 2462 - DNA, 129 bp, Artificial Sequence
  Description of Artificial Sequence: Synthetic antibody
gatcgcttctctggctccaagtctggcaacacggcctccctgtccatctctgggctccaggctgaggatgaggctgattattactgctgctcatatgcaggcagctactctcttgtggtattcggcgga

SEQ ID NO: 2463 - protein, 43 aa, Artificial Sequence
  Description of Artificial Sequence: Synthetic antibody
DRFSGSKSGNTASLSISGLQAEDEADYYCCSYAGSYSLVVFGG

SEQ ID NO: 2464 - protein, 11 aa, Artificial Sequence
  Description of Artificial Sequence: Synthetic antibody
CSYTSSDNYVF

SEQ ID NO: 2465 - DNA, 129 bp, Artificial Sequence
  Description of Artificial Sequence: Synthetic antibody
tctaatcgcttctctggctccaagtctggcaacacggcctccctgacaatctctgggctccaggctgaggacgaggctgattattactgctgctcatatacaagtagtgacaattatgtcttcggaact

SEQ ID NO: 2466 - protein, 43 aa, Artificial Sequence
  Description of Artificial Sequence: Synthetic antibody
SNRFSGSKSGNTASLTISGLQAEDEADYYCCSYTSSDNYVFGT

SEQ ID NO: 2467 - DNA, 129 bp, Artificial Sequence
  Description of Artificial Sequence: Synthetic antibody
ctaatccgcttctctggctccaagtctggcaacacggcctccctgacaatctctgggctccaggctgaggacgaggctgattattactgctgctcatatacaagtagtgacaattatgtcttcggaact

SEQ ID NO: 2468 - protein, 43 aa, Artificial Sequence
  Description of Artificial Sequence: Synthetic antibody
LIRFSGSKSGNTASLTISGLQAEDEADYYCCSYTSSDNYVFGT

SEQ ID NO: 2469 - protein, 11 aa, Artificial Sequence
  Description of Artificial Sequence: Synthetic antibody
CSYAGSHTYVF

SEQ ID NO: 2470 - DNA, 129 bp, Artificial Sequence
  Description of Artificial Sequence: Synthetic antibody
cctgatcgcttctctggctccaagtctggcaactcggcctccctgaccatctctgggctccaggctgaggatgaggctgattattactgctgctcatatgcaggcagccacacttatgtcttcggaact

SEQ ID NO: 2471 - protein, 43 aa, Artificial Sequence
  Description of Artificial Sequence: Synthetic antibody
PDRFSGSKSGNSASLTISGLQAEDEADYYCCSYAGSHTYVFGT

SEQ ID NO: 2472 - DNA, 129 bp, Artificial Sequence
  Description of Artificial Sequence: Synthetic antibody
cctgatcgcttctctggctccaagtctggcaacacggcctccctgaccatctctgggctccaggctgaggatgaggctgattatttctgctgctcatatgcagggagccacacttatgtcttcggaact

SEQ ID NO: 2473 - protein, 43 aa, Artificial Sequence
  Description of Artificial Sequence: Synthetic antibody
PDRFSGSKSGNTASLTISGLQAEDEADYFCCSYAGSHTYVFGT

SEQ ID NO: 2474 - protein, 12 aa, Artificial Sequence
  Description of Artificial Sequence: Synthetic antibody
CSYAGSSTHYVF

SEQ ID NO: 2475 - DNA, 129 bp, Artificial Sequence
  Description of Artificial Sequence: Synthetic antibody
aatcgcttctctggctccaagtctggcaacacggcctccctgacaatctctgggctccaggctgaggacgaggctgattattactgctgctcatatgcaggtagtagcactcattatgtcttcggaact

SEQ ID NO: 2476 - protein, 43 aa, Artificial Sequence
  Description of Artificial Sequence: Synthetic antibody
NRFSGSKSGNTASLTISGLQAEDEADYYCCSYAGSSTHYVFGT

SEQ ID NO: 2477 - DNA, 129 bp, Artificial Sequence
  Description of Artificial Sequence: Synthetic antibody
aatcgcttctctggctccaagtctggcaacacggcctccctgacaatctctgggctccaggctgaggacgaggctgattattactgctgctcatatgcaggtagtagcactcactacgtcttcggaact

SEQ ID NO: 2478 - protein, 12 aa, Artificial Sequence
  Description of Artificial Sequence: Synthetic antibody
CSYAGSSTFFVF

SEQ ID NO: 2479 - DNA, 129 bp, Artificial Sequence
  Description of Artificial Sequence: Synthetic antibody
aatcgcttctctggctccaagtctggcaacacggcctccctgacaatctctgggctccagactgaggacgaggctgattattactgctgctcatatgcaggtagtagcactttttttgtcttcggaact

SEQ ID NO: 2480 - protein, 43 aa, Artificial Sequence
  Description of Artificial Sequence: Synthetic antibody
NRFSGSKSGNTASLTISGLQTEDEADYYCCSYAGSSTFFVFGT

SEQ ID NO: 2481 - DNA, 129 bp, Artificial Sequence
  Description of Artificial Sequence: Synthetic antibody
atccgcttctctggctccaagtctggcaacacggcctccctgacaatctctgggctccagactgaggacgaggctgattattactgctgctcatatgcaggtagtagcactttttttgtcttcggaact

SEQ ID NO: 2482 - protein, 43 aa, Artificial Sequence
  Description of Artificial Sequence: Synthetic antibody
IRFSGSKSGNTASLTISGLQTEDEADYYCCSYAGSSTFFVFGT

SEQ ID NO: 2483 - protein, 9 aa, Artificial Sequence
  Description of Artificial Sequence: Synthetic antibody
CSYAGNYVF

SEQ ID NO: 2484 - DNA, 129 bp, Artificial Sequence
  Description of Artificial Sequence: Synthetic antibody
ggggtccctgatcgcttctctggctccaagtctggcaacacggcctccctgaccatctctgggctccaggctgaggatgaggctgattattactgctgctcatatgcaggcaactatgtcttcggaact

SEQ ID NO: 2485 - protein, 43 aa, Artificial Sequence
  Description of Artificial Sequence: Synthetic antibody
GVPDRFSGSKSGNTASLTISGLQAEDEADYYCCSYAGNYVFGT

SEQ ID NO: 2486 - DNA, 129 bp, Artificial Sequence
  Description of Artificial Sequence: Synthetic antibody
gggggacctgatcgcttctctggctccaagtctggcaacacggcctccctgaccatctctgggctccaggctgaggatgaggctgattattactgctgctcatatgcaggcaactatgtcttcggaact

SEQ ID NO: 2487 - protein, 43 aa, Artificial Sequence
  Description of Artificial Sequence: Synthetic antibody
GGPDRFSGSKSGNTASLTISGLQAEDEADYYCCSYAGNYVFGT

SEQ ID NO: 2488 - protein, 11 aa, Artificial Sequence
  Description of Artificial Sequence: Synthetic antibody
CSYAGSRTVVF

SEQ ID NO: 2489 - DNA, 129 bp, Artificial Sequence
  Description of Artificial Sequence: Synthetic antibody
tctaatcgcttctctggctccaagtctggcaacacggcctccctgacaatctctgggctccaggctgaggacgaggctgattattactgctgctcatatgcaggtagtcgcactgtggtattccgcgga

SEQ ID NO: 2490 - protein, 43 aa, Artificial Sequence
  Description of Artificial Sequence: Synthetic antibody
SNRFSGSKSGNTASLTISGLQAEDEADYYCCSYAGSRTVVFRG

SEQ ID NO: 2491 - DNA, 129 bp, Artificial Sequence
  Description of Artificial Sequence: Synthetic antibody
tctaatcgcttctctggctccaagtctggcaacacggcctccctgacaatctctgggctccaggctgaggacgaggctgattattactgctgctcatatgcaggtagtaggactgtggtattcggcgga

SEQ ID NO: 2492 - protein, 43 aa, Artificial Sequence
  Description of Artificial Sequence: Synthetic antibody
SNRFSGSKSGNTASLTISGLQAEDEADYYCCSYAGSRTVVFGG

SEQ ID NO: 2493 - protein, 11 aa, Artificial Sequence
  Description of Artificial Sequence: Synthetic antibody
CSYAGRSTWVL

SEQ ID NO: 2494 - DNA, 129 bp, Artificial Sequence
  Description of Artificial Sequence: Synthetic antibody
tcttatcgcttctctggctccaagtctggcaacacggcctccctgacaatctctgtgctccaggctgaggacgagagtgattattactgctgctcatatgcagggagaagcacttgggtgctcggcgga

SEQ ID NO: 2495 - protein, 43 aa, Artificial Sequence
  Description of Artificial Sequence: Synthetic antibody
SYRFSGSKSGNTASLTISVLQAEDESDYYCCSYAGRSTWVLGG

SEQ ID NO: 2496 - DNA, 129 bp, Artificial Sequence
  Description of Artificial Sequence: Synthetic antibody
tctaatcgcttctctggctccaagtctggcaacacggcctccctgacaatctctgggctccaggctgaggacgagagtgattattactgctgctcatatgcagggagaagcacttgggtgctcggcgga

SEQ ID NO: 2497 - protein, 43 aa, Artificial Sequence
  Description of Artificial Sequence: Synthetic antibody
SNRFSGSKSGNTASLTISGLQAEDESDYYCCSYAGRSTWVLGG

SEQ ID NO: 2498 - protein, 13 aa, Artificial Sequence
  Description of Artificial Sequence: Synthetic antibody
CSYLGSGTFDVLF

SEQ ID NO: 2499 - DNA, 129 bp, Artificial Sequence
  Description of Artificial Sequence: Synthetic antibody
cgcttctctggctccaagtctggctacacggcctccctgacaatctctgtgctccaggctgaggacgaggctgattattactgctgctcatatttaggtagtggcactttcgatgtgctattcggcgga

SEQ ID NO: 2500 - protein, 43 aa, Artificial Sequence
  Description of Artificial Sequence: Synthetic antibody
RFSGSKSGYTASLTISVLQAEDEADYYCCSYLGSGTFDVLFGG

SEQ ID NO: 2501 - DNA, 129 bp, Artificial Sequence
  Description of Artificial Sequence: Synthetic antibody
cgcttctctggctccaagtctggcaacacggcctccctgacaatctctgggctccaggctgaggacgaggctgattattactgctgctcatatttaggtagtggcactttcgatgtgctattcggcgga

SEQ ID NO: 2502 - protein, 43 aa, Artificial Sequence
  Description of Artificial Sequence: Synthetic antibody
RFSGSKSGNTASLTISGLQAEDEADYYCCSYLGSGTFDVLFGG

SEQ ID NO: 2503 - protein, 11 aa, Artificial Sequence
  Description of Artificial Sequence: Synthetic antibody
CSLTSSITLVF

SEQ ID NO: 2504 - DNA, 129 bp, Artificial Sequence
  Description of Artificial Sequence: Synthetic antibody
tctaatcgcttctctggctccaagtctggcaacacggccttcctgaccatctctgggctccaggctgaggacgaggctgattatcactgctgctcacttacaagcagcatcactctggttttcggcgga

SEQ ID NO: 2505 - protein, 43 aa, Artificial Sequence
  Description of Artificial Sequence: Synthetic antibody
SNRFSGSKSGNTAFLTISGLQAEDEADYHCCSLTSSITLVFGG

SEQ ID NO: 2506 - DNA, 129 bp, Artificial Sequence
  Description of Artificial Sequence: Synthetic antibody
ctaatccgcttctctggctccaagtctggcaacacggccttcctgaccatctctgggctccaggctgaggacgaggctgattatcactgctgctcacttacaagcagcatcactctggttttcggcgga

SEQ ID NO: 2507 - protein, 43 aa, Artificial Sequence
  Description of Artificial Sequence: Synthetic antibody
LIRFSGSKSGNTAFLTISGLQAEDEADYHCCSLTSSITLVFGG

SEQ ID NO: 2508 - protein, 12 aa, Artificial Sequence
  Description of Artificial Sequence: Synthetic antibody
CSYAGSSSLGVF

SEQ ID NO: 2509 - DNA, 129 bp, Artificial Sequence
  Description of Artificial Sequence: Synthetic antibody
aatcgcttctctggctccaagtctggcaacacggcctccctgacaatctctgggctccaggctgaggacgaggctgattattactgctgctcatatgcaggtagtagctccctgggggtgttcggcgga

SEQ ID NO: 2510 - protein, 43 aa, Artificial Sequence
  Description of Artificial Sequence: Synthetic antibody
NRFSGSKSGNTASLTISGLQAEDEADYYCCSYAGSSSLGVFGG

SEQ ID NO: 2511 - DNA, 129 bp, Artificial Sequence
  Description of Artificial Sequence: Synthetic antibody
atccgcttctctggctccaagtctggcaacacggcctccctgacaatctctgggctccaggctgaggacgaggctgattattactgctgctcatatgcaggtagtagctccctgggggtgttcggcgga

SEQ ID NO: 2512 - protein, 43 aa, Artificial Sequence
  Description of Artificial Sequence: Synthetic antibody
IRFSGSKSGNTASLTISGLQAEDEADYYCCSYAGSSSLGVFGG

SEQ ID NO: 2513 - protein, 11 aa, Artificial Sequence
  Description of Artificial Sequence: Synthetic antibody
CSYAGNYTYVF

SEQ ID NO: 2514 - DNA, 129 bp, Artificial Sequence
  Description of Artificial Sequence: Synthetic antibody
ccggttcgcttctctggctccaagtctggcaacacggcctccctgaccatctctgggctccaggctgaggatgaggctgattattgctgctgctcatatgcaggcaactacacttatgtcttcggatct

SEQ ID NO: 2515 - protein, 43 aa, Artificial Sequence
  Description of Artificial Sequence: Synthetic antibody
PVRFSGSKSGNTASLTISGLQAEDEADYCCCSYAGNYTYVFGS

SEQ ID NO: 2516 - DNA, 129 bp, Artificial Sequence
  Description of Artificial Sequence: Synthetic antibody
ccggatcgcttctctggctccaagtctggcaacacggcctccctgaccatctctgggctccaggctgaggatgaggctgattattgctgctgctcatatgcaggcaactacacttatgtcttcggaact

SEQ ID NO: 2517 - protein, 43 aa, Artificial Sequence
  Description of Artificial Sequence: Synthetic antibody
PDRFSGSKSGNTASLTISGLQAEDEADYCCCSYAGNYTYVFGT

SEQ ID NO: 2518 - protein, 11 aa, Artificial Sequence
  Description of Artificial Sequence: Synthetic antibody
CSYAGSHAYVF

SEQ ID NO: 2519 - DNA, 129 bp, Artificial Sequence
  Description of Artificial Sequence: Synthetic antibody
cctgatcgcttctctgtctccaagtctggcatcacggcctccctgaccatctctgggctccaggctgaggatgaggctgattattactgctgctcatatgcaggcagccacgcttatgtcttcggaacc

SEQ ID NO: 2520 - protein, 43 aa, Artificial Sequence
  Description of Artificial Sequence: Synthetic antibody
PDRFSVSKSGITASLTISGLQAEDEADYYCCSYAGSHAYVFGT

SEQ ID NO: 2521 - DNA, 129 bp, Artificial Sequence
  Description of Artificial Sequence: Synthetic antibody
cctgatcgcttctctggctccaagtctggcaacacggcctccctgaccatctctgggctccaggctgaggatgaggctgattattactgctgctcatatgcaggcagccacgcttatgtcttcggaacc

SEQ ID NO: 2522 - protein, 43 aa, Artificial Sequence
  Description of Artificial Sequence: Synthetic antibody
PDRFSGSKSGNTASLTISGLQAEDEADYYCCSYAGSHAYVFGT

SEQ ID NO: 2523 - protein, 12 aa, Artificial Sequence
  Description of Artificial Sequence: Synthetic antibody
CSYAGSSTLWVF

SEQ ID NO: 2524 - DNA, 129 bp, Artificial Sequence
  Description of Artificial Sequence: Synthetic antibody
aatcgcttctctggctccaagtctggcaacacggcctccctgacaatctctgggctccaggctgaggacgaggctgattattactgctgctcatatgcaggtagtagcactctttgggtgttcggcgga

SEQ ID NO: 2525 - protein, 43 aa, Artificial Sequence
  Description of Artificial Sequence: Synthetic antibody
NRFSGSKSGNTASLTISGLQAEDEADYYCCSYAGSSTLWVFGG

SEQ ID NO: 2526 - DNA, 129 bp, Artificial Sequence
  Description of Artificial Sequence: Synthetic antibody
atccgcttctctggctccaagtctggcaacacggcctccctgacaatctctgggctccaggctgaggacgaggctgattattactgctgctcatatgcaggtagtagcactctttgggtgttcggcgga

SEQ ID NO: 2527 - protein, 43 aa, Artificial Sequence
  Description of Artificial Sequence: Synthetic antibody
IRFSGSKSGNTASLTISGLQAEDEADYYCCSYAGSSTLWVFGG

SEQ ID NO: 2528 - DNA, 129 bp, Artificial Sequence
  Description of Artificial Sequence: Synthetic antibody
gtttctaatcgcttctctggctccaagtctggcatcagggcctccctgacaatctctgggctccaggctgaggacgaggctgattatcactgctgctcatatgcaggtagtagcggggtattcggcgga

SEQ ID NO: 2529 - protein, 43 aa, Artificial Sequence
  Description of Artificial Sequence: Synthetic antibody
VSNRFSGSKSGIRASLTISGLQAEDEADYHCCSYAGSSGVFGG

SEQ ID NO: 2530 - DNA, 129 bp, Artificial Sequence
  Description of Artificial Sequence: Synthetic antibody
gtttctaatcgcttctctggctccaagtctggcaacacggcctccctgacaatctctgggctccaggctgaggacgaggctgattatcactgctgctcatatgcaggtagtagcggggtattcggcgga

SEQ ID NO: 2531 - protein, 43 aa, Artificial Sequence
  Description of Artificial Sequence: Synthetic antibody
VSNRFSGSKSGNTASLTISGLQAEDEADYHCCSYAGSSGVFGG

SEQ ID NO: 2532 - protein, 9 aa, Artificial Sequence
  Description of Artificial Sequence: Synthetic antibody
CSFAGAYLF

SEQ ID NO: 2533 - DNA, 129 bp, Artificial Sequence
  Description of Artificial Sequence: Synthetic antibody
ggggtccctgatcgcttctccggctccaagtctggcatcacggcctccctgaccatctctgtgctccaggctgacgatgaggctgattattattgctgctcatttgcaggcgcctacttattcggcgga

SEQ ID NO: 2534 - protein, 43 aa, Artificial Sequence
  Description of Artificial Sequence: Synthetic antibody
GVPDRFSGSKSGITASLTISVLQADDEADYYCCSFAGAYLFGG

SEQ ID NO: 2535 - DNA, 129 bp, Artificial Sequence
  Description of Artificial Sequence: Synthetic antibody
ggggtccctgatcgcttctccggctccaagtctggcaacacggcctccctgaccatctctgggctccaggctgacgatgaggctgattattattgctgctcatttgcaggcgcctacttattcggcgga

SEQ ID NO: 2536 - protein, 43 aa, Artificial Sequence
  Description of Artificial Sequence: Synthetic antibody
GVPDRFSGSKSGNTASLTISGLQADDEADYYCCSFAGAYLFGG

SEQ ID NO: 2537 - protein, 11 aa, Artificial Sequence
  Description of Artificial Sequence: Synthetic antibody
CSYAGDYTLLF

SEQ ID NO: 2538 - DNA, 129 bp, Artificial Sequence
  Description of Artificial Sequence: Synthetic antibody
tctaatcgcttctctgtcttcaagtctgacaacactgcctccctgacaatctctgggctccaggctgaggacgagggtgattattattgctgctcatatgcaggtgattacactttgttattcggcgga

SEQ ID NO: 2539 - protein, 43 aa, Artificial Sequence
  Description of Artificial Sequence: Synthetic antibody
SNRFSVFKSDNTASLTISGLQAEDEGDYYCCSYAGDYTLLFGG

SEQ ID NO: 2540 - DNA, 129 bp, Artificial Sequence
  Description of Artificial Sequence: Synthetic antibody
tctaatcgcttctctggcttcaagtctgacaacacggcctccctgacaatctctgggctccaggctgaggacgagggtgattattattgctgctcatatgcaggtgattacactttgttattcggcgga

SEQ ID NO: 2541 - protein, 43 aa, Artificial Sequence
  Description of Artificial Sequence: Synthetic antibody
SNRFSGFKSDNTASLTISGLQAEDEGDYYCCSYAGDYTLLFGG

SEQ ID NO: 2542 - protein, 12 aa, Artificial Sequence
  Description of Artificial Sequence: Synthetic antibody
CSYTSSGTLVVF

SEQ ID NO: 2543 - DNA, 129 bp, Artificial Sequence
  Description of Artificial Sequence: Synthetic antibody
aatcgcttctctggctccaagtctggcaacacggcctccctggccatctctgggctccaggctgaggacgaggctgattattactgctgctcatatacaagcagtggcactcttgtggttttcggcgga

SEQ ID NO: 2544 - protein, 43 aa, Artificial Sequence
  Description of Artificial Sequence: Synthetic antibody
NRFSGSKSGNTASLAISGLQAEDEADYYCCSYTSSGTLVVFGG

SEQ ID NO: 2545 - DNA, 129 bp, Artificial Sequence
  Description of Artificial Sequence: Synthetic antibody
atccgcttctctggctccaagtctggcaacacggcctccctggccatctctgggctccaggctgaggacgaggctgattattactgctgctcatatacaagcagtggcactcttgtggttttcggcgga

SEQ ID NO: 2546 - protein, 43 aa, Artificial Sequence
  Description of Artificial Sequence: Synthetic antibody
IRFSGSKSGNTASLAISGLQAEDEADYYCCSYTSSGTLVVFGG

SEQ ID NO: 2547 - protein, 14 aa, Artificial Sequence
  Description of Artificial Sequence: Synthetic antibody
CSYAGSSTFKAYVF

SEQ ID NO: 2548 - DNA, 129 bp, Artificial Sequence
  Description of Artificial Sequence: Synthetic antibody
ttctctggctccatgtctggcaacacggcctccctgactatctctgggctccaggctgaggacgaggctgattattactgctgctcatatgcaggtagtagcactttcaaggcttatgtcttcggaact

SEQ ID NO: 2549 - protein, 43 aa, Artificial Sequence
  Description of Artificial Sequence: Synthetic antibody
FSGSMSGNTASLTISGLQAEDEADYYCCSYAGSSTFKAYVFGT

SEQ ID NO: 2550 - DNA, 129 bp, Artificial Sequence
  Description of Artificial Sequence: Synthetic antibody
ttctctggctccaagtctggcaacacggcctccctgacaatctctgggctccaggctgaggacgaggctgattattactgctgctcatatgcaggtagtagcactttcaaggcttatgtcttcggaact

SEQ ID NO: 2551 - protein, 43 aa, Artificial Sequence
  Description of Artificial Sequence: Synthetic antibody
FSGSKSGNTASLTISGLQAEDEADYYCCSYAGSSTFKAYVFGT

SEQ ID NO: 2552 - protein, 11 aa, Artificial Sequence
  Description of Artificial Sequence: Synthetic antibody
CSYAGSHTVVF

SEQ ID NO: 2553 - DNA, 129 bp, Artificial Sequence
  Description of Artificial Sequence: Synthetic antibody
cctgatcgcttctctggctccaagtctggcaacacggcctccctgaccatctctgggctccaggctgaggatgaggctgattattactgctgctcatatgccggcagccacactgtggtattcggcgga

SEQ ID NO: 2554 - protein, 43 aa, Artificial Sequence
  Description of Artificial Sequence: Synthetic antibody
PDRFSGSKSGNTASLTISGLQAEDEADYYCCSYAGSHTVVFGG

SEQ ID NO: 2555 - DNA, 129 bp, Artificial Sequence
  Description of Artificial Sequence: Synthetic antibody
cctgatcgcttctctggctccaagcctggcaacacggcctccctgaccatctctgggctccaggctgaggatgaggctgattattactgctgctcatatgcaggcagccacactgtggtattcggcgga

SEQ ID NO: 2556 - protein, 43 aa, Artificial Sequence
  Description of Artificial Sequence: Synthetic antibody
PDRFSGSKPGNTASLTISGLQAEDEADYYCCSYAGSHTVVFGG

SEQ ID NO: 2557 - protein, 11 aa, Artificial Sequence
  Description of Artificial Sequence: Synthetic antibody
CSYAGSFTLVF

SEQ ID NO: 2558 - DNA, 129 bp, Artificial Sequence
  Description of Artificial Sequence: Synthetic antibody
cctgatcgcttctctggctccaagtctggcaacacggcctccctgacgatctctgggctccaggctgaggatgaggctgattattactgctgctcatatgcaggcagcttcactttggtattcggcgga

SEQ ID NO: 2559 - protein, 43 aa, Artificial Sequence
  Description of Artificial Sequence: Synthetic antibody
PDRFSGSKSGNTASLTISGLQAEDEADYYCCSYAGSFTLVFGG

SEQ ID NO: 2560 - DNA, 129 bp, Artificial Sequence
  Description of Artificial Sequence: Synthetic antibody
cctgatcgcttctctggctccaagtctgacaacacggcctccctgagcatctctgggctccaggctgaggatgaggctgattattactgctgctcatatgcaggcagcttcactttggtattcggcgga

SEQ ID NO: 2561 - protein, 43 aa, Artificial Sequence
  Description of Artificial Sequence: Synthetic antibody
PDRFSGSKSDNTASLSISGLQAEDEADYYCCSYAGSFTLVFGG

SEQ ID NO: 2562 - protein, 11 aa, Artificial Sequence
  Description of Artificial Sequence: Synthetic antibody
CSYVGSDIWVF

SEQ ID NO: 2563 - DNA, 129 bp, Artificial Sequence
  Description of Artificial Sequence: Synthetic antibody
tctaatcgcttctctggctccaagtctggcaacacggcctccctgacaatctctggcctccaggctgaggacgaggctgattattactgctgctcatatgtaggtagtgacatttgggtgttcggcgga

SEQ ID NO: 2564 - protein, 43 aa, Artificial Sequence
  Description of Artificial Sequence: Synthetic antibody
SNRFSGSKSGNTASLTISGLQAEDEADYYCCSYVGSDIWVFGG

SEQ ID NO: 2565 - DNA, 129 bp, Artificial Sequence
  Description of Artificial Sequence: Synthetic antibody
ctaatccgcttctctggctccaagtctggcaacacggcctccctgacaatctctggcctccaggctgaggacgaggctgattattactgctgctcatatgtaggtagtgacatttgggtgttcggcgga

SEQ ID NO: 2566 - protein, 43 aa, Artificial Sequence
  Description of Artificial Sequence: Synthetic antibody
LIRFSGSKSGNTASLTISGLQAEDEADYYCCSYVGSDIWVFGG

SEQ ID NO: 2567 - protein, 12 aa, Artificial Sequence
  Description of Artificial Sequence: Synthetic antibody
CSYAGSSTLNVF

SEQ ID NO: 2568 - DNA, 129 bp, Artificial Sequence
  Description of Artificial Sequence: Synthetic antibody
aatcgcttctctggctccaagtctggcaacacggcctccctgacaatctctgggctccaggctgaggacgaggctgattattactgctgctcatatgcaggtagtagcactttaaatgtcttcggaact

SEQ ID NO: 2569 - protein, 43 aa, Artificial Sequence
  Description of Artificial Sequence: Synthetic antibody
NRFSGSKSGNTASLTISGLQAEDEADYYCCSYAGSSTLNVFGT

SEQ ID NO: 2570 - DNA, 129 bp, Artificial Sequence
  Description of Artificial Sequence: Synthetic antibody
aatcgcttctctggctccaagtctggcaacacggcccccctgacaatctcttggctccaggctgaggacgaggctgattattactgctgctcatatgcaggtagtagcactttaaatgtcttcggaact

SEQ ID NO: 2571 - protein, 43 aa, Artificial Sequence
  Description of Artificial Sequence: Synthetic antibody
NRFSGSKSGNTAPLTISWLQAEDEADYYCCSYAGSSTLNVFGT

SEQ ID NO: 2572 - protein, 14 aa, Artificial Sequence
  Description of Artificial Sequence: Synthetic antibody
CSYAGSSTFAYVVF

SEQ ID NO: 2573 - DNA, 129 bp, Artificial Sequence
  Description of Artificial Sequence: Synthetic antibody
ttctctggctccaagtctgtcaacacggcctccctgacaatctctgggctccagtctgaggacgaggctgattattactgctgctcatatgcaggtagtagcactttcgcctatgtggtattcggcgga

SEQ ID NO: 2574 - protein, 43 aa, Artificial Sequence
  Description of Artificial Sequence: Synthetic antibody
FSGSKSVNTASLTISGLQSEDEADYYCCSYAGSSTFAYVVFGG

SEQ ID NO: 2575 - DNA, 129 bp, Artificial Sequence
  Description of Artificial Sequence: Synthetic antibody
ttctctggctccaagtctggcaacacggcctccctgacaatctctgggctccaggctgaggacgaggctgattattactgctgctcatatgcaggtagtagcactttcgcctatgtggtattcggcgga

SEQ ID NO: 2576 - protein, 43 aa, Artificial Sequence
  Description of Artificial Sequence: Synthetic antibody
FSGSKSGNTASLTISGLQAEDEADYYCCSYAGSSTFAYVVFGG

SEQ ID NO: 2577 - protein, 12 aa, Artificial Sequence
  Description of Artificial Sequence: Synthetic antibody
CSFEGTDNGYVF

SEQ ID NO: 2578 - DNA, 129 bp, Artificial Sequence
  Description of Artificial Sequence: Synthetic antibody
gatcgcttctctggctccaagtctggcatcacggcctccctgtccgtctctgggctcctggctgaggatgaggctgattattactgctgctcatttgaaggcaccgacaatggttatgtcttcggagct

SEQ ID NO: 2579 - protein, 43 aa, Artificial Sequence
  Description of Artificial Sequence: Synthetic antibody
DRFSGSKSGITASLSVSGLLAEDEADYYCCSFEGTDNGYVFGA

SEQ ID NO: 2580 - DNA, 129 bp, Artificial Sequence
  Description of Artificial Sequence: Synthetic antibody
gatcgcttctctggctccaagtctggcaacacggcctccctgaccgtctctgggctcctggctgaggatgaggctgattattactgctgctcatttgaaggcaccgacaatggttatgtcttcggagct

SEQ ID NO: 2581 - protein, 43 aa, Artificial Sequence
  Description of Artificial Sequence: Synthetic antibody
DRFSGSKSGNTASLTVSGLLAEDEADYYCCSFEGTDNGYVFGA

SEQ ID NO: 2582 - protein, 12 aa, Artificial Sequence
  Description of Artificial Sequence: Synthetic antibody
CSYAGSSTFVLF

SEQ ID NO: 2583 - DNA, 129 bp, Artificial Sequence
  Description of Artificial Sequence: Synthetic antibody
aatcgcttctctggctccaagtctggcaacacggcctccctgacaatctctgggctccaggctgaggacgaggctgattattactgctgctcatatgcaggtagtagcactttcgtgctattccgcgga

SEQ ID NO: 2584 - protein, 43 aa, Artificial Sequence
  Description of Artificial Sequence: Synthetic antibody
NRFSGSKSGNTASLTISGLQAEDEADYYCCSYAGSSTFVLFRG

SEQ ID NO: 2585 - DNA, 129 bp, Artificial Sequence
  Description of Artificial Sequence: Synthetic antibody
aatcgcttctctggctccaagtctggcaacacggcctccctgacaatctctgggctccaggctgaggacgaggctgattattactgctgctcatatgcaggtagtagcactttcgtcctattcggcgga

SEQ ID NO: 2586 - protein, 43 aa, Artificial Sequence
  Description of Artificial Sequence: Synthetic antibody
NRFSGSKSGNTASLTISGLQAEDEADYYCCSYAGSSTFVLFGG

SEQ ID NO: 2587 - protein, 12 aa, Artificial Sequence
  Description of Artificial Sequence: Synthetic antibody
CSFVRSSAHVVF

SEQ ID NO: 2588 - DNA, 129 bp, Artificial Sequence
  Description of Artificial Sequence: Synthetic antibody
aatcgcttctctggctccaagtctggcaacacggcctccctgacaatctctgggctccaggctgaggacgaggctgattattactgctgctcatttgtacgtagtagcgctcatgtggtcttcggcgga

SEQ ID NO: 2589 - protein, 43 aa, Artificial Sequence
  Description of Artificial Sequence: Synthetic antibody
NRFSGSKSGNTASLTISGLQAEDEADYYCCSFVRSSAHVVFGG

SEQ ID NO: 2590 - DNA, 129 bp, Artificial Sequence
  Description of Artificial Sequence: Synthetic antibody
tatcgcttctctggctccaagtctggcaacacggcctccctgacaatctctgggctccaggctgaggacgaggctgattattactgctgctcatttgtacgtagtagcgctcatgtggtcttcggcgga

SEQ ID NO: 2591 - protein, 43 aa, Artificial Sequence
  Description of Artificial Sequence: Synthetic antibody
YRFSGSKSGNTASLTISGLQAEDEADYYCCSFVRSSAHVVFGG

SEQ ID NO: 2592 - protein, 13 aa, Artificial Sequence
  Description of Artificial Sequence: Synthetic antibody
CSYAGSYTFGYVF

SEQ ID NO: 2593 - DNA, 129 bp, Artificial Sequence
  Description of Artificial Sequence: Synthetic antibody
cgcttctctggctccaagtctggcaacgcggcctccctgaccatctctgggctccaggctgaggatgaggctgattattactgctgctcatatgcaggcagctacactttcggttacgtcttcggaact

SEQ ID NO: 2594 - protein, 43 aa, Artificial Sequence
  Description of Artificial Sequence: Synthetic antibody
RFSGSKSGNAASLTISGLQAEDEADYYCCSYAGSYTFGYVFGT

SEQ ID NO: 2595 - DNA, 129 bp, Artificial Sequence
  Description of Artificial Sequence: Synthetic antibody
cgcttctctggctccaagtctggcaacacggcctccctgaccatctctgggctccaggctgaggatgaggctgattattactgctgctcatatgcaggcagctacactttcggttatgtcttcggaact

SEQ ID NO: 2596 - protein, 43 aa, Artificial Sequence
  Description of Artificial Sequence: Synthetic antibody
RFSGSKSGNTASLTISGLQAEDEADYYCCSYAGSYTFGYVFGT

SEQ ID NO: 2597 - DNA, 129 bp, Artificial Sequence
  Description of Artificial Sequence: Synthetic antibody
ggggtttctaatcgcttctctggctccaagtctggcaacacggcctccctgtcaatctctgggctccaggctgaggacgaggctgattattactgctgctcatatgcaggtagttgggtattcggcggt

SEQ ID NO: 2598 - DNA, 129 bp, Artificial Sequence
  Description of Artificial Sequence: Synthetic antibody
ggggtttctaatcgcttctctggctccaagtctggcaacacggcctccctgacaatctctgggctccgggctgaggacgaggctgattattactgctgctcatatgcaggtagttgggtattcgacgga

SEQ ID NO: 2599 - protein, 43 aa, Artificial Sequence
  Description of Artificial Sequence: Synthetic antibody
GVSNRFSGSKSGNTASLTISGLRAEDEADYYCCSYAGSWVFDG

SEQ ID NO: 2600 - protein, 11 aa, Artificial Sequence
  Description of Artificial Sequence: Synthetic antibody
CSYAGVGTYVF

SEQ ID NO: 2601 - DNA, 129 bp, Artificial Sequence
  Description of Artificial Sequence: Synthetic antibody
tctattcgcttctctggctccaagtctggcaacacggcctccctgacaatctctgggctccaggctgaggacgaggctgattattactgctgctcatatgcaggtgttggcacttatgtcttcggaatt

SEQ ID NO: 2602 - protein, 43 aa, Artificial Sequence
  Description of Artificial Sequence: Synthetic antibody
SIRFSGSKSGNTASLTISGLQAEDEADYYCCSYAGVGTYVFGI

SEQ ID NO: 2603 - DNA, 129 bp, Artificial Sequence
  Description of Artificial Sequence: Synthetic antibody
tctattcgcttctctggctccaaggctggcaacacggcctccctgacattctctgggctccaggctgaggacgaggctgattattactgctgctcatatgcaggtgttggcacttatgtcttcggaatt

SEQ ID NO: 2604 - protein, 43 aa, Artificial Sequence
  Description of Artificial Sequence: Synthetic antibody
SIRFSGSKAGNTASLTFSGLQAEDEADYYCCSYAGVGTYVFGI

SEQ ID NO: 2605 - protein, 11 aa, Artificial Sequence
  Description of Artificial Sequence: Synthetic antibody
CSYAGGFTLLF

SEQ ID NO: 2606 - DNA, 129 bp, Artificial Sequence
  Description of Artificial Sequence: Synthetic antibody
tctaatcgcttctctggctccaagtctggcaacacggcctccctgacaatctctgggctccaggctggcgatgaggctgattattactgctgctcgtatgcaggtggtttcactttactttttggcgga

SEQ ID NO: 2607 - protein, 43 aa, Artificial Sequence
  Description of Artificial Sequence: Synthetic antibody
SNRFSGSKSGNTASLTISGLQAGDEADYYCCSYAGGFTLLFGG

SEQ ID NO: 2608 - DNA, 129 bp, Artificial Sequence
  Description of Artificial Sequence: Synthetic antibody
tctaatcgcttctctggctccaagtctggcaacacggcctccctgacaatctctgggctccaggctgacgacgaggctgattattactgctgctcgtatgcaggtggtttcactttactttttggcgga

SEQ ID NO: 2609 - protein, 43 aa, Artificial Sequence
  Description of Artificial Sequence: Synthetic antibody
SNRFSGSKSGNTASLTISGLQADDEADYYCCSYAGGFTLLFGG

SEQ ID NO: 2610 - protein, 11 aa, Artificial Sequence
  Description of Artificial Sequence: Synthetic antibody
CSYAGSSTDVF

SEQ ID NO: 2611 - DNA, 129 bp, Artificial Sequence
  Description of Artificial Sequence: Synthetic antibody
tctaatcgcttctctggctccaagtctggtaacacggcctccctgacaatctctgggctccaggctgaggacgaggctgattattgctgctgctcatatgcaggtagtagcacggatgtcttcggaact

SEQ ID NO: 2612 - protein, 43 aa, Artificial Sequence
  Description of Artificial Sequence: Synthetic antibody
SNRFSGSKSGNTASLTISGLQAEDEADYCCCSYAGSSTDVFGT

SEQ ID NO: 2613 - DNA, 129 bp, Artificial Sequence
  Description of Artificial Sequence: Synthetic antibody
tctaatcgcttctctggctccaagtctggcaacacggcctccctgacaatctctgggctccaggctgaggacgaggctgattattactgctgctcatatgcaggtagtagcacggatgtcttcggaact

SEQ ID NO: 2614 - protein, 43 aa, Artificial Sequence
  Description of Artificial Sequence: Synthetic antibody
SNRFSGSKSGNTASLTISGLQAEDEADYYCCSYAGSSTDVFGT

SEQ ID NO: 2615 - protein, 11 aa, Artificial Sequence
  Description of Artificial Sequence: Synthetic antibody
CSYTRSRGVVF

SEQ ID NO: 2616 - DNA, 129 bp, Artificial Sequence
  Description of Artificial Sequence: Synthetic antibody
tctaatcgcttctctggctccaagtctggcaacacggcctccctgacaatctctgggctccaggctgaggacgaggctgattattactgctgctcatatacacgtagtaggggggtggtattcggcgga

SEQ ID NO: 2617 - protein, 43 aa, Artificial Sequence
  Description of Artificial Sequence: Synthetic antibody
SNRFSGSKSGNTASLTISGLQAEDEADYYCCSYTRSRGVVFGG

SEQ ID NO: 2618 - DNA, 129 bp, Artificial Sequence
  Description of Artificial Sequence: Synthetic antibody
tctaatcgcttctctggctccaagtctggcaacacggcccccctgacaatctctgggctccaggctgaggacgaggctgattattactgctgctcatatacacgtagtaggggggtggtattcggcgga

SEQ ID NO: 2619 - protein, 43 aa, Artificial Sequence
  Description of Artificial Sequence: Synthetic antibody
SNRFSGSKSGNTAPLTISGLQAEDEADYYCCSYTRSRGVVFGG

SEQ ID NO: 2620 - protein, 12 aa, Artificial Sequence
  Description of Artificial Sequence: Synthetic antibody
CSYAGSSTSGVF

SEQ ID NO: 2621 - DNA, 129 bp, Artificial Sequence
  Description of Artificial Sequence: Synthetic antibody
aatcgcttctctggctccaagtctggcaacacggcctccctgacaatctctgggctccaggctgaggacgaggctgattattactgctgctcatatgcaggtagtagcacttcgggggtattcggcgga

SEQ ID NO: 2622 - protein, 43 aa, Artificial Sequence
  Description of Artificial Sequence: Synthetic antibody
NRFSGSKSGNTASLTISGLQAEDEADYYCCSYAGSSTSGVFGG

SEQ ID NO: 2623 - DNA, 129 bp, Artificial Sequence
  Description of Artificial Sequence: Synthetic antibody
atccgcttctctggctccaagtctggcaacacggcctccctgacaatctctgggctccaggctgaggacgaggctgattattactgctgctcatatgcaggtagtagcacttcgggggtattcggcgga

SEQ ID NO: 2624 - protein, 43 aa, Artificial Sequence
  Description of Artificial Sequence: Synthetic antibody
IRFSGSKSGNTASLTISGLQAEDEADYYCCSYAGSSTSGVFGG

SEQ ID NO: 2625 - protein, 11 aa, Artificial Sequence
  Description of Artificial Sequence: Synthetic antibody
CSYAGSSTYIF

SEQ ID NO: 2626 - DNA, 129 bp, Artificial Sequence
  Description of Artificial Sequence: Synthetic antibody
tgtaatcgcttctgtggctccaagtctggcaacacggcctccctgacaatctctggactccaggctgaggacgaggctgaatattactgctgctcatatgcaggtagtagcacttatatcttcggaact

SEQ ID NO: 2627 - protein, 43 aa, Artificial Sequence
  Description of Artificial Sequence: Synthetic antibody
CNRFCGSKSGNTASLTISGLQAEDEAEYYCCSYAGSSTYIFGT

SEQ ID NO: 2628 - DNA, 129 bp, Artificial Sequence
  Description of Artificial Sequence: Synthetic antibody
tctaatcgcttctctggctccaagtctggcaacacggcctccctgacaatctctggactccaggctgaggacgaggctgaatattactgctgctcatatgcaggtagtagcacttatatcttcggaact

SEQ ID NO: 2629 - protein, 43 aa, Artificial Sequence
  Description of Artificial Sequence: Synthetic antibody
SNRFSGSKSGNTASLTISGLQAEDEAEYYCCSYAGSSTYIFGT

SEQ ID NO: 2630 - protein, 11 aa, Artificial Sequence
  Description of Artificial Sequence: Synthetic antibody
CSYAGSYSFLF

SEQ ID NO: 2631 - DNA, 129 bp, Artificial Sequence
  Description of Artificial Sequence: Synthetic antibody
cctgatcgcttctctggctccaagtctggcaacacggcctccctgaccatctcttggctccagtctgaggatgaggctgattattactgctgttcatatgcaggcagttatagtttcttattcggcgga

SEQ ID NO: 2632 - protein, 43 aa, Artificial Sequence
  Description of Artificial Sequence: Synthetic antibody
PDRFSGSKSGNTASLTISWLQSEDEADYYCCSYAGSYSFLFGG

SEQ ID NO: 2633 - DNA, 129 bp, Artificial Sequence
  Description of Artificial Sequence: Synthetic antibody
cctgatcgcttctctggctccaagtctggcaacacggcctccctgaccatctctgggctccaggctgaggatgaggctgattattactgctgttcatatgcaggcagttatagtttcttattcggcgga

SEQ ID NO: 2634 - protein, 43 aa, Artificial Sequence
  Description of Artificial Sequence: Synthetic antibody
PDRFSGSKSGNTASLTISGLQAEDEADYYCCSYAGSYSFLFGG

SEQ ID NO: 2635 - protein, 12 aa, Artificial Sequence
  Description of Artificial Sequence: Synthetic antibody
CSYAGSYTGVVF

SEQ ID NO: 2636 - DNA, 129 bp, Artificial Sequence
  Description of Artificial Sequence: Synthetic antibody
gatcgcttctctggctccaagtcttgcaacacggcctccctgaccatctctgggctccaggctgaggatgaggctgattattactgctgctcatatgcaggcagctacacaggggttgtattcggcgga

SEQ ID NO: 2637 - protein, 43 aa, Artificial Sequence
  Description of Artificial Sequence: Synthetic antibody
DRFSGSKSCNTASLTISGLQAEDEADYYCCSYAGSYTGVVFGG

SEQ ID NO: 2638 - DNA, 129 bp, Artificial Sequence
  Description of Artificial Sequence: Synthetic antibody
gatcgcttctctggctccaagtctggcaacacggcctccctgaccatctctgggctccaggctgaggatgaggctgattattactgctgctcatatgcaggcagctacacaggggtggtattcggcgga

SEQ ID NO: 2639 - protein, 43 aa, Artificial Sequence
  Description of Artificial Sequence: Synthetic antibody
DRFSGSKSGNTASLTISGLQAEDEADYYCCSYAGSYTGVVFGG

SEQ ID NO: 2640 - protein, 11 aa, Artificial Sequence
  Description of Artificial Sequence: Synthetic antibody
CSYGDTSPAIF

SEQ ID NO: 2641 - DNA, 129 bp, Artificial Sequence
  Description of Artificial Sequence: Synthetic antibody
tctgatcgcttctctggctccaagtctggcaatacggcctccctggcaatctctgggctccagactgaggacgaggctgattatttctgctgctcatatggcgatactagccccgcgatattcggcgga

SEQ ID NO: 2642 - protein, 43 aa, Artificial Sequence
  Description of Artificial Sequence: Synthetic antibody
SDRFSGSKSGNTASLAISGLQTEDEADYFCCSYGDTSPAIFGG

SEQ ID NO: 2643 - DNA, 129 bp, Artificial Sequence
  Description of Artificial Sequence: Synthetic antibody
tctgatcgcttctctgactccaagtctggcaatacggcctccctggcaatctctgggctccagactgaggacgaggctgattatttctgctgctcatatggagatactagccccgcgatattcggcgga

SEQ ID NO: 2644 - protein, 43 aa, Artificial Sequence
  Description of Artificial Sequence: Synthetic antibody
SDRFSDSKSGNTASLAISGLQTEDEADYFCCSYGDTSPAIFGG

SEQ ID NO: 2645 - protein, 10 aa, Artificial Sequence
  Description of Artificial Sequence: Synthetic antibody
CSYAGCSVVF

SEQ ID NO: 2646 - DNA, 129 bp, Artificial Sequence
  Description of Artificial Sequence: Synthetic antibody
gtttcttatcgcttctctggctccaagtctggcaacacagcctccctgacaatctctgggatccaggctgaggacgaggctgattattattgttgttcatatgcaggttgtagcgtggtattcggcgga

SEQ ID NO: 2647 - protein, 43 aa, Artificial Sequence
  Description of Artificial Sequence: Synthetic antibody
VSYRFSGSKSGNTASLTISGIQAEDEADYYCCSYAGCSVVFGG

SEQ ID NO: 2648 - DNA, 129 bp, Artificial Sequence
  Description of Artificial Sequence: Synthetic antibody
gtttctattcgcttctctggctccaagtctggcaacacagcctccctgacaatctctgggatccaggctgaggacgaggctgattattattgttgttcatatgcaggttgtagcgtggtattcggcgga

SEQ ID NO: 2649 - protein, 43 aa, Artificial Sequence
  Description of Artificial Sequence: Synthetic antibody
VSIRFSGSKSGNTASLTISGIQAEDEADYYCCSYAGCSVVFGG

SEQ ID NO: 2650 - protein, 11 aa, Artificial Sequence
  Description of Artificial Sequence: Synthetic antibody
CSHAGRYPYVF

SEQ ID NO: 2651 - DNA, 129 bp, Artificial Sequence
  Description of Artificial Sequence: Synthetic antibody
cctgatcgcttctctggctccaagtctggcaactcggcctccctgtccatctctgggctccaggctgaagatgaggctgattattattgctgctcacatgcaggcaggtacccttatgtcttcggaact

SEQ ID NO: 2652 - protein, 43 aa, Artificial Sequence
  Description of Artificial Sequence: Synthetic antibody
PDRFSGSKSGNSASLSISGLQAEDEADYYCCSHAGRYPYVFGT

SEQ ID NO: 2653 - DNA, 129 bp, Artificial Sequence
  Description of Artificial Sequence: Synthetic antibody
cctgatcgcttctctggctccaagtctggcaacacggcctccctggccatctctgggctccaggctgaagatgaggctgattattattgctgctcacatgcaggcaggtacccttatgtcttcggaact

SEQ ID NO: 2654 - protein, 43 aa, Artificial Sequence
  Description of Artificial Sequence: Synthetic antibody
PDRFSGSKSGNTASLAISGLQAEDEADYYCCSHAGRYPYVFGT

SEQ ID NO: 2655 - protein, 12 aa, Artificial Sequence
  Description of Artificial Sequence: Synthetic antibody
CSYAGSSSFVVF

SEQ ID NO: 2656 - DNA, 129 bp, Artificial Sequence
  Description of Artificial Sequence: Synthetic antibody
aatcgcttctctggctccaagtctggcaacacggcctccctgactatctctgggctccaggctgaggacgaggctgattattactgctgctcatatgcaggtagtagctctttcgtggtattcggcgga

SEQ ID NO: 2657 - protein, 43 aa, Artificial Sequence
  Description of Artificial Sequence: Synthetic antibody
NRFSGSKSGNTASLTISGLQAEDEADYYCCSYAGSSSFVVFGG

SEQ ID NO: 2658 - DNA, 129 bp, Artificial Sequence
  Description of Artificial Sequence: Synthetic antibody
aatcgcttctctggctccaagtctggcaacacggcctccctgacaatctctgggctccaggctgaggacgaggctgattattactgctgctcatatgcaggtagtagcagtttcgtggtattcggggga

SEQ ID NO: 2659 - protein, 11 aa, Artificial Sequence
  Description of Artificial Sequence: Synthetic antibody
CSYAGSTTYVF

SEQ ID NO: 2660 - DNA, 129 bp, Artificial Sequence
  Description of Artificial Sequence: Synthetic antibody
tctaatcgcttctctggctccaagtctggcaacacggcctccctgacaatctctgggctccaggctgaggacgaggctgattattactgctgctcatatgcaggtagtaccacctatgtcttccgaact

SEQ ID NO: 2661 - protein, 43 aa, Artificial Sequence
  Description of Artificial Sequence: Synthetic antibody
SNRFSGSKSGNTASLTISGLQAEDEADYYCCSYAGSTTYVFRT

SEQ ID NO: 2662 - DNA, 129 bp, Artificial Sequence
  Description of Artificial Sequence: Synthetic antibody
tctaatcgcttctctggctccaagtctggcaacacggcctccctgacaatctctgggctccaggctgaggacgaggctgactattactgctgctcatatgcaggtagtaccacttatgtcttcggaacc

SEQ ID NO: 2663 - protein, 43 aa, Artificial Sequence
  Description of Artificial Sequence: Synthetic antibody
SNRFSGSKSGNTASLTISGLQAEDEADYYCCSYAGSTTYVFGT

SEQ ID NO: 2664 - protein, 11 aa, Artificial Sequence
  Description of Artificial Sequence: Synthetic antibody
CSYTGSHTRVF

SEQ ID NO: 2665 - DNA, 129 bp, Artificial Sequence
  Description of Artificial Sequence: Synthetic antibody
cctgatcggctctctggctgcaagtctggcaactcggcctccctgagcatctctgggctccaggctgaggatgaggctgattattactgctgctcatatacaggcagccacacccgtgtattcggcgga

SEQ ID NO: 2666 - protein, 43 aa, Artificial Sequence
  Description of Artificial Sequence: Synthetic antibody
PDRLSGCKSGNSASLSISGLQAEDEADYYCCSYTGSHTRVFGG

SEQ ID NO: 2667 - DNA, 129 bp, Artificial Sequence
  Description of Artificial Sequence: Synthetic antibody
cctgatcggctctctggctgcaagtctggcaacacggcctccctgaccatctctgggctccaggctgaggatgaggctgattattactgctgctcatatacaggcagccacacccgtgtattcggcgga

SEQ ID NO: 2668 - protein, 43 aa, Artificial Sequence
  Description of Artificial Sequence: Synthetic antibody
PDRLSGCKSGNTASLTISGLQAEDEADYYCCSYTGSHTRVFGG

SEQ ID NO: 2669 - protein, 12 aa, Artificial Sequence
  Description of Artificial Sequence: Synthetic antibody
CSYAGSYTHYVF

SEQ ID NO: 2670 - DNA, 129 bp, Artificial Sequence
  Description of Artificial Sequence: Synthetic antibody
gttcgcttctctggctcgaagtctggcaacacggcctccctgaccatctctgggctccaggctgaggatgaggctgattattactgctgctcatatgcaggcagctacacccactatgtcttcggaact

SEQ ID NO: 2671 - protein, 43 aa, Artificial Sequence
  Description of Artificial Sequence: Synthetic antibody
VRFSGSKSGNTASLTISGLQAEDEADYYCCSYAGSYTHYVFGT

SEQ ID NO: 2672 - DNA, 129 bp, Artificial Sequence
  Description of Artificial Sequence: Synthetic antibody
gatcgcttctctggctccaagtctggcaacacggcctccctgaccatctctgggctccaggctgaggatgaggctgattattactgctgctcatatgcaggcagctacacccactatgtcttcggaact

SEQ ID NO: 2673 - protein, 43 aa, Artificial Sequence
  Description of Artificial Sequence: Synthetic antibody
DRFSGSKSGNTASLTISGLQAEDEADYYCCSYAGSYTHYVFGT

SEQ ID NO: 2674 - protein, 12 aa, Artificial Sequence
  Description of Artificial Sequence: Synthetic antibody
CSYTRPTPGYVF

SEQ ID NO: 2675 - DNA, 129 bp, Artificial Sequence
  Description of Artificial Sequence: Synthetic antibody
gatggcttctctgggtccatgtctggcagcacggcctccctgaccatctctgggctccagcctgaagacgaggctgattattactgctgctcatatacaagacccactcccggttatgtcttcgggact

SEQ ID NO: 2676 - protein, 43 aa, Artificial Sequence
  Description of Artificial Sequence: Synthetic antibody
DGFSGSMSGSTASLTISGLQPEDEADYYCCSYTRPTPGYVFGT

SEQ ID NO: 2677 - DNA, 129 bp, Artificial Sequence
  Description of Artificial Sequence: Synthetic antibody
gatcgcttctctgggtccaagtctggcagcacggcctccctgaccatctctgggctccagcctgaagacgaggctgattattactgctgctcatatacaagacccactcccggttatgtcttcgggact

SEQ ID NO: 2678 - protein, 43 aa, Artificial Sequence
  Description of Artificial Sequence: Synthetic antibody
DRFSGSKSGSTASLTISGLQPEDEADYYCCSYTRPTPGYVFGT

SEQ ID NO: 2679 - protein, 11 aa, Artificial Sequence
  Description of Artificial Sequence: Synthetic antibody
CSFVSGNSYVF

SEQ ID NO: 2680 - DNA, 129 bp, Artificial Sequence
  Description of Artificial Sequence: Synthetic antibody
tctaatcgcttctctggctccaagtctggcaactcggcctccctgacaatctcttggctccaggctgacgacgaggctgattattactgctgctcgtttgtaagtggtaacagttatgtcttcggaact

SEQ ID NO: 2681 - protein, 43 aa, Artificial Sequence
  Description of Artificial Sequence: Synthetic antibody
SNRFSGSKSGNSASLTISWLQADDEADYYCCSFVSGNSYVFGT

SEQ ID NO: 2682 - DNA, 129 bp, Artificial Sequence
  Description of Artificial Sequence: Synthetic antibody
tctaatcgcttctctggctccaagtctggcaacacggcctccctgacaatctctgggctccaggctgacgacgaggctgattattactgctgctcgtttgtaagtggtaacagttatgtcttcggaact

SEQ ID NO: 2683 - protein, 43 aa, Artificial Sequence
  Description of Artificial Sequence: Synthetic antibody
SNRFSGSKSGNTASLTISGLQADDEADYYCCSFVSGNSYVFGT

SEQ ID NO: 2684 - protein, 13 aa, Artificial Sequence
  Description of Artificial Sequence: Synthetic antibody
CSYAGSSTFMWYS

SEQ ID NO: 2685 - DNA, 129 bp, Artificial Sequence
  Description of Artificial Sequence: Synthetic antibody
cgcttctctggctccaagtctggcaacacggcctccctgacaatctctgggctccaggctgaggacgaggctgattattactgctgctcatatgcaggtagtagcacttttatgtggtattcggcggag

SEQ ID NO: 2686 - protein, 43 aa, Artificial Sequence
  Description of Artificial Sequence: Synthetic antibody
RFSGSKSGNTASLTISGLQAEDEADYYCCSYAGSSTFMWYSAE

SEQ ID NO: 2687 - DNA, 129 bp, Artificial Sequence
  Description of Artificial Sequence: Synthetic antibody
cgcttctctggctccaagtctggcaacacggcctccctgacaatctctgggctccaggctgaggacgaggctgattattactgctgctcatatgcaggtagtagcactttcatgtggtattcggcggag

SEQ ID NO: 2688 - protein, 11 aa, Artificial Sequence
  Description of Artificial Sequence: Synthetic antibody
CSYAGGKTGVF

SEQ ID NO: 2689 - DNA, 129 bp, Artificial Sequence
  Description of Artificial Sequence: Synthetic antibody
tctaatcgcttctctggctccaagtctggcaacacggcctccctgacaatctctgggcttcaggctgaggacgaggctgattattactgctgctcatatgcaggtggtaaaacgggggtcttcggaact

SEQ ID NO: 2690 - protein, 43 aa, Artificial Sequence
  Description of Artificial Sequence: Synthetic antibody
SNRFSGSKSGNTASLTISGLQAEDEADYYCCSYAGGKTGVFGT

SEQ ID NO: 2691 - DNA, 129 bp, Artificial Sequence
  Description of Artificial Sequence: Synthetic antibody
ctaatccgcttctctggctccaagtctggcaacacggcctccctgacaatctctgggcttcaggctgaggacgaggctgattattactgctgctcatatgcaggtggtaaaacgggggtcttcggaact

SEQ ID NO: 2692 - protein, 43 aa, Artificial Sequence
  Description of Artificial Sequence: Synthetic antibody
LIRFSGSKSGNTASLTISGLQAEDEADYYCCSYAGGKTGVFGT

SEQ ID NO: 2693 - protein, 12 aa, Artificial Sequence
  Description of Artificial Sequence: Synthetic antibody
CSYADSSSFYVF

SEQ ID NO: 2694 - DNA, 129 bp, Artificial Sequence
  Description of Artificial Sequence: Synthetic antibody
aatcgcttctctggctgcaagtctggcaacacggcctccctgacaatctctgggctccaggctgaggacgaggctgattattactgttgctcatatgcagatagtagctctttctatgtcttcggaact

SEQ ID NO: 2695 - protein, 43 aa, Artificial Sequence
  Description of Artificial Sequence: Synthetic antibody
NRFSGCKSGNTASLTISGLQAEDEADYYCCSYADSSSFYVFGT

SEQ ID NO: 2696 - DNA, 129 bp, Artificial Sequence
  Description of Artificial Sequence: Synthetic antibody
aatcgcttctctggctccaagtctggcaacacggcctcccagacaatctctgggctccaggctgaggacgaggctgattattactgttgctcatatgcagatagtagctctttctatgtcttcggaact

SEQ ID NO: 2697 - protein, 43 aa, Artificial Sequence
  Description of Artificial Sequence: Synthetic antibody
NRFSGSKSGNTASQTISGLQAEDEADYYCCSYADSSSFYVFGT

SEQ ID NO: 2698 - protein, 12 aa, Artificial Sequence
  Description of Artificial Sequence: Synthetic antibody
CSYAGSSTNVVF

SEQ ID NO: 2699 - DNA, 129 bp, Artificial Sequence
  Description of Artificial Sequence: Synthetic antibody
aatcgcttctctggctccaagtctggcaacacggcctccctgacaatctctgggctccaggctgaggacgaggctgattattactgctgctcatatgcaggtagtagcactaatgtggtattcggcgga

SEQ ID NO: 2700 - protein, 43 aa, Artificial Sequence
  Description of Artificial Sequence: Synthetic antibody
NRFSGSKSGNTASLTISGLQAEDEADYYCCSYAGSSTNVVFGG

SEQ ID NO: 2701 - DNA, 129 bp, Artificial Sequence
  Description of Artificial Sequence: Synthetic antibody
atccgcttctctggctccaagtctggcaacacggcctccctgacaatctctgggctccaggctgaggacgaggctgattattactgctgctcatatgcaggtagtagcactaatgtggtattcggcgga

SEQ ID NO: 2702 - protein, 43 aa, Artificial Sequence
  Description of Artificial Sequence: Synthetic antibody
IRFSGSKSGNTASLTISGLQAEDEADYYCCSYAGSSTNVVFGG

SEQ ID NO: 2703 - protein, 11 aa, Artificial Sequence
  Description of Artificial Sequence: Synthetic antibody
CSYTSSRTGVF

SEQ ID NO: 2704 - DNA, 129 bp, Artificial Sequence
  Description of Artificial Sequence: Synthetic antibody
tctaatcgcttctctggctccaagtctggcaacacggcctccctgaccatctctgggctccaggctgaggacgaggctgattattactgctgctcatacacaagtagcagaactggggtgttcggcggg

SEQ ID NO: 2705 - protein, 43 aa, Artificial Sequence
  Description of Artificial Sequence: Synthetic antibody
SNRFSGSKSGNTASLTISGLQAEDEADYYCCSYTSSRTGVFGG

SEQ ID NO: 2706 - DNA, 129 bp, Artificial Sequence
  Description of Artificial Sequence: Synthetic antibody
ctaatccgcttctctggctccaagtctggcaacacggcctccctgaccatctctgggctccaggctgaggacgaggctgattattactgctgctcatacacaagtagcagaactggggtgttcggcggg

SEQ ID NO: 2707 - protein, 43 aa, Artificial Sequence
  Description of Artificial Sequence: Synthetic antibody
LIRFSGSKSGNTASLTISGLQAEDEADYYCCSYTSSRTGVFGG

SEQ ID NO: 2708 - protein, 9 aa, Artificial Sequence
  Description of Artificial Sequence: Synthetic antibody
CSYAGFYVF

SEQ ID NO: 2709 - DNA, 129 bp, Artificial Sequence
  Description of Artificial Sequence: Synthetic antibody
ggggtttcttatcgcttctctggctccaagtctggcaacacggcctccctgacaatctctgggctccaggctgaggacgaggctgattattactgctgctcatatgcaggtttttatgtcttcggaact

SEQ ID NO: 2710 - protein, 43 aa, Artificial Sequence
  Description of Artificial Sequence: Synthetic antibody
GVSYRFSGSKSGNTASLTISGLQAEDEADYYCCSYAGFYVFGT

SEQ ID NO: 2711 - DNA, 129 bp, Artificial Sequence
  Description of Artificial Sequence: Synthetic antibody
ggggtttctaatcgcttctctggctccaagtctggcaacacggcctccctgacaatctctgggctccaggctgaggacgaggctgattattactgctgctcatatgcaggtttttatgtcttcggaact

SEQ ID NO: 2712 - protein, 43 aa, Artificial Sequence
  Description of Artificial Sequence: Synthetic antibody
GVSNRFSGSKSGNTASLTISGLQAEDEADYYCCSYAGFYVFGT

SEQ ID NO: 2713 - protein, 11 aa, Artificial Sequence
  Description of Artificial Sequence: Synthetic antibody
CSYAGRDTVAF

SEQ ID NO: 2714 - DNA, 129 bp, Artificial Sequence
  Description of Artificial Sequence: Synthetic antibody
cctgatcgcttctctggctccaagtctgtcaacactgcctccctgaccatctctgggctccaggctgaggatgaggctgattattattgctgctcatatgcaggcagagacactgtggcattcggcgga

SEQ ID NO: 2715 - protein, 43 aa, Artificial Sequence
  Description of Artificial Sequence: Synthetic antibody
PDRFSGSKSVNTASLTISGLQAEDEADYYCCSYAGRDTVAFGG

SEQ ID NO: 2716 - DNA, 129 bp, Artificial Sequence
  Description of Artificial Sequence: Synthetic antibody
cctgatcgcttctctggctccaagtctggcaacacggcctccctgaccatctctgggctccaggctgaggatgaggctgattattattgctgctcatatgcaggcagagacactgtggcattcggcgga

SEQ ID NO: 2717 - protein, 43 aa, Artificial Sequence
  Description of Artificial Sequence: Synthetic antibody
PDRFSGSKSGNTASLTISGLQAEDEADYYCCSYAGRDTVAFGG

SEQ ID NO: 2718 - protein, 11 aa, Artificial Sequence
  Description of Artificial Sequence: Synthetic antibody
CSYAGSTTVVF

SEQ ID NO: 2719 - DNA, 129 bp, Artificial Sequence
  Description of Artificial Sequence: Synthetic antibody
tctaatcgcttctctggctccaagtctggcaacacggcctccctgacaatctctgggctccaggctgaggacgaggctgattattactgctgctcatatgcaggtagtaccactgtcgtattcggcggc

SEQ ID NO: 2720 - protein, 43 aa, Artificial Sequence
  Description of Artificial Sequence: Synthetic antibody
SNRFSGSKSGNTASLTISGLQAEDEADYYCCSYAGSTTVVFGG

SEQ ID NO: 2721 - DNA, 129 bp, Artificial Sequence
  Description of Artificial Sequence: Synthetic antibody
tctaatcgcttctctggctccaagtctggcaacacggcctccctgacaatctctgggctccaggctgaggacgaggctgattattactgctgctcatatgcaggtagtaccactgtcgtattcggcgga

SEQ ID NO: 2722 - protein, 6 aa, Artificial Sequence
  Description of Artificial Sequence: Synthetic antibody
CSFSVF

SEQ ID NO: 2723 - DNA, 129 bp, Artificial Sequence
  Description of Artificial Sequence: Synthetic antibody
cggccctcaggggtttctaatcgcttctctggctccaagtctcgcaacacggcctccctgacaatctctgggctccaggctgaggacgaggctgattattactgctgctcatttagtgtcttcggaact

SEQ ID NO: 2724 - protein, 43 aa, Artificial Sequence
  Description of Artificial Sequence: Synthetic antibody
RPSGVSNRFSGSKSRNTASLTISGLQAEDEADYYCCSFSVFGT

SEQ ID NO: 2725 - DNA, 129 bp, Artificial Sequence
  Description of Artificial Sequence: Synthetic antibody
cggccatcaggggtttctaatcgcttctctggctccaagtctggcaacacggcctccctgacaatctctgggctccaggctgaggacgaggctgattattactgctgctcatttagtgtcttcggaact

SEQ ID NO: 2726 - protein, 43 aa, Artificial Sequence
  Description of Artificial Sequence: Synthetic antibody
RPSGVSNRFSGSKSGNTASLTISGLQAEDEADYYCCSFSVFGT

SEQ ID NO: 2727 - protein, 11 aa, Artificial Sequence
  Description of Artificial Sequence: Synthetic antibody
CSYGDTRPVIF

SEQ ID NO: 2728 - DNA, 129 bp, Artificial Sequence
  Description of Artificial Sequence: Synthetic antibody
tctgatcgcttctctggctccaagtctgtcaatacggcctccctggcaatctctgggctccagactgaggacgaggctgattatttctgctgctcatatggagatactagacccgtgatattcggcgga

SEQ ID NO: 2729 - protein, 43 aa, Artificial Sequence
  Description of Artificial Sequence: Synthetic antibody
SDRFSGSKSVNTASLAISGLQTEDEADYFCCSYGDTRPVIFGG

SEQ ID NO: 2730 - DNA, 129 bp, Artificial Sequence
  Description of Artificial Sequence: Synthetic antibody
tctgatcgcttctctggctccaagtctggcaatacggcctccctggcaatctctgggctccagactgaggacgaggctgattatttctgctgctcatatggagatactcgccccgtgatattcggcggc

SEQ ID NO: 2731 - protein, 43 aa, Artificial Sequence
  Description of Artificial Sequence: Synthetic antibody
SDRFSGSKSGNTASLAISGLQTEDEADYFCCSYGDTRPVIFGG

SEQ ID NO: 2732 - protein, 13 aa, Artificial Sequence
  Description of Artificial Sequence: Synthetic antibody
CARLLGGWGGQTW

SEQ ID NO: 2733 - DNA, 129 bp, Artificial Sequence
  Description of Artificial Sequence: Synthetic antibody
ttcatctccatacacaaccccaagaacacgctttatttgcaaatgaacagtctgagagccgaggacacggctgtctattactgtgcaagactcctgggtgggtggggaggtcagacttggggccaggga

SEQ ID NO: 2734 - protein, 43 aa, Artificial Sequence
  Description of Artificial Sequence: Synthetic antibody
FISIHNPKNTLYLQMNSLRAEDTAVYYCARLLGGWGGQTWGQG

SEQ ID NO: 2735 - DNA, 129 bp, Artificial Sequence
  Description of Artificial Sequence: Synthetic antibody
ttcatctccagagacaacgccaagaacacgctgtatttgcaaatgaacagtctgagagccgaggacacggctgtctattactgtgcaagactcctgggtgggtggggaggtcagacttggggccaggga

SEQ ID NO: 2736 - protein, 43 aa, Artificial Sequence
  Description of Artificial Sequence: Synthetic antibody
FISRDNAKNTLYLQMNSLRAEDTAVYYCARLLGGWGGQTWGQG

SEQ ID NO: 2737 - DNA, 129 bp, Artificial Sequence
  Description of Artificial Sequence: Synthetic antibody
atcatctccatagacaacgccaagaacacgctgtatttgcaaatgaacagtctgagagccgaggacacggctgtctattactgtgcaagactcctgggtgggtggggaggtcagacttggggccaggga

SEQ ID NO: 2738 - protein, 43 aa, Artificial Sequence
  Description of Artificial Sequence: Synthetic antibody
IISIDNAKNTLYLQMNSLRAEDTAVYYCARLLGGWGGQTWGQG

SEQ ID NO: 2739 - DNA, 129 bp, Artificial Sequence
  Description of Artificial Sequence: Synthetic antibody
atcatctccatacacaacgccaagaacacgctgtatttgcaaatgaacagtctgagagccgaggacacggctgtctattactgtgcaagactcctgggtgggtggggaggtcagacttggggccaggga

SEQ ID NO: 2740 - protein, 43 aa, Artificial Sequence
  Description of Artificial Sequence: Synthetic antibody
IISIHNAKNTLYLQMNSLRAEDTAVYYCARLLGGWGGQTWGQG

SEQ ID NO: 2741 - DNA, 129 bp, Artificial Sequence
  Description of Artificial Sequence: Synthetic antibody
atcatctccatacacaacgccaagaacacgatgtatttgcaaatcaacagtcttagagccgaggacacggctgtctattactgtgcaagactcctgggtgggtggggaggtcagacttggggccaggga

SEQ ID NO: 2742 - protein, 43 aa, Artificial Sequence
  Description of Artificial Sequence: Synthetic antibody
IISIHNAKNTMYLQINSLRAEDTAVYYCARLLGGWGGQTWGQG

SEQ ID NO: 2743 - DNA, 129 bp, Artificial Sequence
  Description of Artificial Sequence: Synthetic antibody
atcatctccagagacaacgccaagaacacgctgtatttgcaaatgaacagtctgagagccgaggacacggctgtctattactgtgcaagactcctgggtgggtggggaggtcagacttggggccaggga

SEQ ID NO: 2744 - protein, 43 aa, Artificial Sequence
  Description of Artificial Sequence: Synthetic antibody
IISRDNAKNTLYLQMNSLRAEDTAVYYCARLLGGWGGQTWGQG

SEQ ID NO: 2745 - DNA, 129 bp, Artificial Sequence
  Description of Artificial Sequence: Synthetic antibody
atcatctccagagacaacgccaagaacacgctgtatttgcaaatgaacagtctgagagccgaggacacggctgtctattactgtgcaagactcctgggggggtggggaggtcagacttggggccaggga

SEQ ID NO: 2746 - DNA, 129 bp, Artificial Sequence
  Description of Artificial Sequence: Synthetic antibody
atcatctccagagacaaccccaagaacacgctgtatttgcaaatgaacagtctgagagccgaggacacggctgtctattactgtgcaagactcctgggtgggtggggaggtcagacttggggccaggga

SEQ ID NO: 2747 - protein, 43 aa, Artificial Sequence
  Description of Artificial Sequence: Synthetic antibody
IISRDNPKNTLYLQMNSLRAEDTAVYYCARLLGGWGGQTWGQG

SEQ ID NO: 2748 - DNA, 129 bp, Artificial Sequence
  Description of Artificial Sequence: Synthetic antibody
atcatctccagacacaacgccaagaacacgctgtatttgcaaatgaacagtcttagagccgaggacacggctgtctattactgtgcaagactcctgggtgggtggggaggtcagacttggggccaggga

SEQ ID NO: 2749 - protein, 43 aa, Artificial Sequence
  Description of Artificial Sequence: Synthetic antibody
IISRHNAKNTLYLQMNSLRAEDTAVYYCARLLGGWGGQTWGQG

SEQ ID NO: 2750 - DNA, 129 bp, Artificial Sequence
  Description of Artificial Sequence: Synthetic antibody
atcatctccagacacaacgccaagaacacgctgtatttgcaaatgaacagtctgagagccgaggacacggctgtctattactgtgcaagactcctgggtgggtggggaggtcagacttggggccaggga

SEQ ID NO: 2751 - DNA, 129 bp, Artificial Sequence
  Description of Artificial Sequence: Synthetic antibody
atcatctccagacacaacgccaagaacacgctgtatttgcaaatgaacagtctgagagccgaggacacggctgtctattactgtgcaagactcctgggggggtggggaggtcagacttggggccaggga

SEQ ID NO: 2752 - DNA, 129 bp, Artificial Sequence
  Description of Artificial Sequence: Synthetic antibody
atcatctccagacacaaccccaagaacacgctgtatttgcaaatgaacagtctgagagccgaggacacggctgtctattactgtgcaagactcctgggtgggtggggaggtcagacttggggccaggga

SEQ ID NO: 2753 - protein, 43 aa, Artificial Sequence
  Description of Artificial Sequence: Synthetic antibody
IISRHNPKNTLYLQMNSLRAEDTAVYYCARLLGGWGGQTWGQG

SEQ ID NO: 2754 - protein, 14 aa, Artificial Sequence
  Description of Artificial Sequence: Synthetic antibody
CARGWGFGELWDYW

SEQ ID NO: 2755 - DNA, 129 bp, Artificial Sequence
  Description of Artificial Sequence: Synthetic antibody
ttctccagagaaaatgccaagaactccttgtatcttcaaatgaacagcctgagagccggggacacggctgtgtattactgtgcaagaggttgggggttcggggagttgtgggactactggggccaggga

SEQ ID NO: 2756 - protein, 43 aa, Artificial Sequence
  Description of Artificial Sequence: Synthetic antibody
FSRENAKNSLYLQMNSLRAGDTAVYYCARGWGFGELWDYWGQG

SEQ ID NO: 2757 - DNA, 129 bp, Artificial Sequence
  Description of Artificial Sequence: Synthetic antibody
atctccatagaaaatgccaagaactccttgtatcttcaaatgaacagcctgagagccggggacacggctgtgtattactgtgcaagaggttgggggttcggggagttgtgggactactggggccaggga

SEQ ID NO: 2758 - protein, 43 aa, Artificial Sequence
  Description of Artificial Sequence: Synthetic antibody
ISIENAKNSLYLQMNSLRAGDTAVYYCARGWGFGELWDYWGQG

SEQ ID NO: 2759 - DNA, 129 bp, Artificial Sequence
  Description of Artificial Sequence: Synthetic antibody
atctccatacaaaatgccaagaactccttgtatcttcaaatgaacagcctgagagccggggacacggctgtgtattactgtgcaagaggttgggggttcggggagttgtgggactactggggccaggga

SEQ ID NO: 2760 - protein, 43 aa, Artificial Sequence
  Description of Artificial Sequence: Synthetic antibody
ISIQNAKNSLYLQMNSLRAGDTAVYYCARGWGFGELWDYWGQG

SEQ ID NO: 2761 - DNA, 129 bp, Artificial Sequence
  Description of Artificial Sequence: Synthetic antibody
atctccatacaaaatcccaagaactccttgtatcttcaaatgaacagcctgagagccggggacacggctgtgtattactgtgcaagaggttgggggttcggggagttgtgggactactggggccaggga

SEQ ID NO: 2762 - protein, 43 aa, Artificial Sequence
  Description of Artificial Sequence: Synthetic antibody
ISIQNPKNSLYLQMNSLRAGDTAVYYCARGWGFGELWDYWGQG

SEQ ID NO: 2763 - DNA, 129 bp, Artificial Sequence
  Description of Artificial Sequence: Synthetic antibody
atctccagagaaaatgccaagaactccttgtatcttcaaatgaacagcctgagagccggggacacggctgtgtattactgtgcaagaggttgggggttcggggagttgtgggactactggggccaggga

SEQ ID NO: 2764 - protein, 43 aa, Artificial Sequence
  Description of Artificial Sequence: Synthetic antibody
ISRENAKNSLYLQMNSLRAGDTAVYYCARGWGFGELWDYWGQG

SEQ ID NO: 2765 - DNA, 129 bp, Artificial Sequence
  Description of Artificial Sequence: Synthetic antibody
atctccagagaaaatgccaacaactccttgtatcttcaaatgaacagcctgagagccggggacacggctgtgtattactgtgcaagaggttgggggttcggggagttgtgggactactggggccaggga

SEQ ID NO: 2766 - protein, 43 aa, Artificial Sequence
  Description of Artificial Sequence: Synthetic antibody
ISRENANNSLYLQMNSLRAGDTAVYYCARGWGFGELWDYWGQG

SEQ ID NO: 2767 - DNA, 129 bp, Artificial Sequence
  Description of Artificial Sequence: Synthetic antibody
atctccagagaaaatcccaagaactccttgtatcttcaaatgaacagcctgagagccggggacacggctgtgtattactgtgcaagaggttgggggttcggggagttgtgggactactggggccaggga

SEQ ID NO: 2768 - protein, 43 aa, Artificial Sequence
  Description of Artificial Sequence: Synthetic antibody
ISRENPKNSLYLQMNSLRAGDTAVYYCARGWGFGELWDYWGQG

SEQ ID NO: 2769 - DNA, 129 bp, Artificial Sequence
  Description of Artificial Sequence: Synthetic antibody
atctccagagaaaatcccaacaactccttgtatcttcaaatgaacagcctgagagccggggacacggctgtgtattactgtgcaagaggttgggggttcggggagttgtgggactactggggccaggga

SEQ ID NO: 2770 - protein, 43 aa, Artificial Sequence
  Description of Artificial Sequence: Synthetic antibody
ISRENPNNSLYLQMNSLRAGDTAVYYCARGWGFGELWDYWGQG

SEQ ID NO: 2771 - DNA, 129 bp, Artificial Sequence
  Description of Artificial Sequence: Synthetic antibody
atctccagacaaaatgccaagaactccttgtatcttcaaatgaacagcctgagagccggggacacggctgtgtattactgtgcaagaggttgggggttcggggagttgtgggactactggggccaggga

SEQ ID NO: 2772 - protein, 43 aa, Artificial Sequence
  Description of Artificial Sequence: Synthetic antibody
ISRQNAKNSLYLQMNSLRAGDTAVYYCARGWGFGELWDYWGQG

SEQ ID NO: 2773 - DNA, 129 bp, Artificial Sequence
  Description of Artificial Sequence: Synthetic antibody
atctccagacaaaatcccaagaactccttgtatcttcaaatgaacagcctgagagccggggacacggctgtgtattactgtgcaagaggttgggggttcggggagttgtgggactactggggccaggga

SEQ ID NO: 2774 - protein, 43 aa, Artificial Sequence
  Description of Artificial Sequence: Synthetic antibody
ISRQNPKNSLYLQMNSLRAGDTAVYYCARGWGFGELWDYWGQG

SEQ ID NO: 2775 - protein, 15 aa, Artificial Sequence
  Description of Artificial Sequence: Synthetic antibody
CAHRRVALATRFDIW

SEQ ID NO: 2776 - DNA, 129 bp, Artificial Sequence
  Description of Artificial Sequence: Synthetic antibody
actatggacgcctccaaaaacctggtggtcctcacaatggccaacatggaccctgaggacacggccacatattattgtgcacacagaagagtggcgttggcgactcgttttgatatctggggccaaggg

SEQ ID NO: 2777 - protein, 43 aa, Artificial Sequence
  Description of Artificial Sequence: Synthetic antibody
TMDASKNLVVLTMANMDPEDTATYYCAHRRVALATRFDIWGQG

SEQ ID NO: 2778 - DNA, 129 bp, Artificial Sequence
  Description of Artificial Sequence: Synthetic antibody
actatggacgactccaaaaaccaggtggtcctcacaatggccaacatggaccctgaggacacggccacatattattgtgcacacagaagagtggcgttggcgactcgttttgatatctggggccaaggg

SEQ ID NO: 2779 - protein, 43 aa, Artificial Sequence
  Description of Artificial Sequence: Synthetic antibody
TMDDSKNQVVLTMANMDPEDTATYYCAHRRVALATRFDIWGQG

SEQ ID NO: 2780 - DNA, 129 bp, Artificial Sequence
  Description of Artificial Sequence: Synthetic antibody
actaaggactactccaaaaaccaggtggtcctcacaatggccaacatggaccctgaggacacggccacatattactgtgcacacagaagagtggcgttggcgactcgttttgatatctggggccaaggg

SEQ ID NO: 2781 - protein, 43 aa, Artificial Sequence
  Description of Artificial Sequence: Synthetic antibody
TKDYSKNQVVLTMANMDPEDTATYYCAHRRVALATRFDIWGQG

SEQ ID NO: 2782 - DNA, 129 bp, Artificial Sequence
  Description of Artificial Sequence: Synthetic antibody
actaaggacgcctccaaaaaccaggtggtcctcacaatggccaacatggaccctgaggacacggccacatattattgtgcacacagaagagtggcgttggcgactcgttttgatatctggggccaaggg

SEQ ID NO: 2783 - protein, 43 aa, Artificial Sequence
  Description of Artificial Sequence: Synthetic antibody
TKDASKNQVVLTMANMDPEDTATYYCAHRRVALATRFDIWGQG

SEQ ID NO: 2784 - DNA, 129 bp, Artificial Sequence
  Description of Artificial Sequence: Synthetic antibody
actaaggacgactccaaaaacctggtggtcctcacaatggccaacatggaccctgaggacacggccacatattattgtgcacacagaagagtggcgttggcgactcgttttgatatctggggccaaggg

SEQ ID NO: 2785 - protein, 43 aa, Artificial Sequence
  Description of Artificial Sequence: Synthetic antibody
TKDDSKNLVVLTMANMDPEDTATYYCAHRRVALATRFDIWGQG

SEQ ID NO: 2786 - DNA, 129 bp, Artificial Sequence
  Description of Artificial Sequence: Synthetic antibody
actaaggacacctccaaaaaccaggtggtcctcacaatggccaacatggaccctgaggacacggccacatattactgtgcacacagaagagtggcgttggcgactcgttttgatatctggggccaaggg

SEQ ID NO: 2787 - protein, 43 aa, Artificial Sequence
  Description of Artificial Sequence: Synthetic antibody
TKDTSKNQVVLTMANMDPEDTATYYCAHRRVALATRFDIWGQG

SEQ ID NO: 2788 - DNA, 129 bp, Artificial Sequence
  Description of Artificial Sequence: Synthetic antibody
acaaaggacacctccaagagccaggtggtcctcacaatggccaatatggaccctgacgacacggccacatattactgtgcacacagaagagtggcgttggcgactcgttttgatatttggggccaaggg

SEQ ID NO: 2789 - protein, 43 aa, Artificial Sequence
  Description of Artificial Sequence: Synthetic antibody
TKDTSKSQVVLTMANMDPDDTATYYCAHRRVALATRFDIWGQG

SEQ ID NO: 2790 - DNA, 129 bp, Artificial Sequence
  Description of Artificial Sequence: Synthetic antibody
ctaacgcacgcctccaaaaaccaggtggtcctcacaatggccaacatggaccctgaggacacggccacatattattgtgcacacagaagagtggcgttggcgactcgttttgatatctggggccaaggg

SEQ ID NO: 2791 - protein, 43 aa, Artificial Sequence
  Description of Artificial Sequence: Synthetic antibody
LTHASKNQVVLTMANMDPEDTATYYCAHRRVALATRFDIWGQG

SEQ ID NO: 2792 - DNA, 129 bp, Artificial Sequence
  Description of Artificial Sequence: Synthetic antibody
actatggacgcctccaaaaaccaggtggtcctcacaatggccaacatggaccctgaggacacggccacatattattgtgcacacagaagagtggcgttggcgactcgttttgatatctggggccaaggg

SEQ ID NO: 2793 - protein, 43 aa, Artificial Sequence
  Description of Artificial Sequence: Synthetic antibody
TMDASKNQVVLTMANMDPEDTATYYCAHRRVALATRFDIWGQG

SEQ ID NO: 2794 - protein, 16 aa, Artificial Sequence
  Description of Artificial Sequence: Synthetic antibody
CAHGVGGWDGQYFDYW

SEQ ID NO: 2795 - DNA, 129 bp, Artificial Sequence
  Description of Artificial Sequence: Synthetic antibody
aaggacacctccaaaagccaggtggtccttacaatgaccaacatggaccctgtggacacagccacatattactgtgcacacggtgttggaggctgggatgggcagtactttgactactggggccaagga

SEQ ID NO: 2796 - protein, 43 aa, Artificial Sequence
  Description of Artificial Sequence: Synthetic antibody
KDTSKSQVVLTMTNMDPVDTATYYCAHGVGGWDGQYFDYWGQG

SEQ ID NO: 2797 - DNA, 129 bp, Artificial Sequence
  Description of Artificial Sequence: Synthetic antibody
aaggactcctccaaaaaccaggtggtccttacaatgaccaacatggaccctgtggacacagccacatattactgtgcacacggtgttggcggctgggatgggcagtactttgactactggggccaggga

SEQ ID NO: 2798 - protein, 43 aa, Artificial Sequence
  Description of Artificial Sequence: Synthetic antibody
KDSSKNQVVLTMTNMDPVDTATYYCAHGVGGWDGQYFDYWGQG

SEQ ID NO: 2799 - DNA, 129 bp, Artificial Sequence
  Description of Artificial Sequence: Synthetic antibody
aaggacacgtccaaaaaccaggtggtcctttcaatgaccaacatggaccctgaggacacagccacatattactgtgcacacggtgttggaggctgggatgggcaatactttgactactggggccaggga

SEQ ID NO: 2800 - protein, 43 aa, Artificial Sequence
  Description of Artificial Sequence: Synthetic antibody
KDTSKNQVVLSMTNMDPEDTATYYCAHGVGGWDGQYFDYWGQG

SEQ ID NO: 2801 - DNA, 129 bp, Artificial Sequence
  Description of Artificial Sequence: Synthetic antibody
aaggacacgtccaaaaaccaggtggtccttacaatgaccaacatggaccctgtggacacagccacatattactgtgcacacggtgttggaggctgggatgggcagtactttgactactggggccaggga

SEQ ID NO: 2802 - protein, 43 aa, Artificial Sequence
  Description of Artificial Sequence: Synthetic antibody
KDTSKNQVVLTMTNMDPVDTATYYCAHGVGGWDGQYFDYWGQG

SEQ ID NO: 2803 - DNA, 129 bp, Artificial Sequence
  Description of Artificial Sequence: Synthetic antibody
aaggacacctccaaaaaccaggttgtccttacaatgaccaacatggaccctgtggacacagccacatattactgtgcacacggtgttggaggctgggatgggcaatactttgactactggggccaggga

SEQ ID NO: 2804 - DNA, 129 bp, Artificial Sequence
  Description of Artificial Sequence: Synthetic antibody
aaggacacctccaaaaaccaggtggtccttagaatgaccaacatggaccctgcggacacagccacatattactgtgcacacggtgttggaggctgggatgggcagtattttgactactgggggcaggga

SEQ ID NO: 2805 - protein, 43 aa, Artificial Sequence
  Description of Artificial Sequence: Synthetic antibody
KDTSKNQVVLRMTNMDPADTATYYCAHGVGGWDGQYFDYWGQG

SEQ ID NO: 2806 - DNA, 129 bp, Artificial Sequence
  Description of Artificial Sequence: Synthetic antibody
aaggacacctccaaaaaccaggtggtccttacaatgaccaacatggaccctgtggacacagccacatattactgtgcacacggtgttggaggctgggatgggcagtactttgactactggggccaggga

SEQ ID NO: 2807 - DNA, 129 bp, Artificial Sequence
  Description of Artificial Sequence: Synthetic antibody
aaggacacctccaaaaaccaggtggtcctaacaatgaccaacatggaccctgtagacacagccacatattactgtgcacacggtgttggaggctgggatgggcagtactttgactactggggccaggga

SEQ ID NO: 2808 - DNA, 129 bp, Artificial Sequence
  Description of Artificial Sequence: Synthetic antibody
aaggacaactcgaaaaaccaggtggtccttagattgaccgacatggaccctgcggacacagccacatattactgtgcacacggtgttggaggctgggatgggcagtattttgactactgggggcaggga

SEQ ID NO: 2809 - protein, 43 aa, Artificial Sequence
  Description of Artificial Sequence: Synthetic antibody
KDNSKNQVVLRLTDMDPADTATYYCAHGVGGWDGQYFDYWGQG

SEQ ID NO: 2810 - protein, 14 aa, Artificial Sequence
  Description of Artificial Sequence: Synthetic antibody
CQYGSGSYDWFDPW

SEQ ID NO: 2811 - DNA, 129 bp, Artificial Sequence
  Description of Artificial Sequence: Synthetic antibody
atctccttagatgattcaaagaacacggcgtatctgcaaatgaacagcctgaaaaccgaggacacggccgtgtattactgtcaatatggttcggggagttatgactggttcgacccctggggccaggga

SEQ ID NO: 2812 - protein, 43 aa, Artificial Sequence
  Description of Artificial Sequence: Synthetic antibody
ISLDDSKNTAYLQMNSLKTEDTAVYYCQYGSGSYDWFDPWGQG

SEQ ID NO: 2813 - DNA, 129 bp, Artificial Sequence
  Description of Artificial Sequence: Synthetic antibody
atctccatatttcattcaaagaacacggcgtatctgcaaatgaacagccttaaaaccgaggacacggccgtgtattactgtcaatatggttcggggagttatgactggttcgacccctggggccaggga

SEQ ID NO: 2814 - protein, 43 aa, Artificial Sequence
  Description of Artificial Sequence: Synthetic antibody
ISIFHSKNTAYLQMNSLKTEDTAVYYCQYGSGSYDWFDPWGQG

SEQ ID NO: 2815 - DNA, 129 bp, Artificial Sequence
  Description of Artificial Sequence: Synthetic antibody
atctccatatatgattcaaagaacacggcgtatctgcaaatgaacagcctgaaaaccgaggacacggccgtgtattactgtcaatatggttcggggagttatgactggttcgacccctggggccaggga

SEQ ID NO: 2816 - protein, 43 aa, Artificial Sequence
  Description of Artificial Sequence: Synthetic antibody
ISIYDSKNTAYLQMNSLKTEDTAVYYCQYGSGSYDWFDPWGQG

SEQ ID NO: 2817 - DNA, 129 bp, Artificial Sequence
  Description of Artificial Sequence: Synthetic antibody
atctccatagattattcaaagaacacggcgtatctgcaaatgaacagcctgaaaaccgaggacacggccgtgtattactgtcaatatggttcggggagttatgactggttcgacccctggggccaggga

SEQ ID NO: 2818 - protein, 43 aa, Artificial Sequence
  Description of Artificial Sequence: Synthetic antibody
ISIDYSKNTAYLQMNSLKTEDTAVYYCQYGSGSYDWFDPWGQG

SEQ ID NO: 2819 - DNA, 129 bp, Artificial Sequence
  Description of Artificial Sequence: Synthetic antibody
atctccatagatcattcaaagaacacggcgtatctgcaaatgaacagcctgaaaaccgaggacacggccgtgtattactgtcaatatggttcggggagttatgactggttcgacccctggggccaggga

SEQ ID NO: 2820 - protein, 43 aa, Artificial Sequence
  Description of Artificial Sequence: Synthetic antibody
ISIDHSKNTAYLQMNSLKTEDTAVYYCQYGSGSYDWFDPWGQG

SEQ ID NO: 2821 - DNA, 129 bp, Artificial Sequence
  Description of Artificial Sequence: Synthetic antibody
atctccagagattattcaaacaacacggcgtatctgcaaatgaacagcctgaaaaccgaggacacggccgtgtattactgtcaatatggttcggggagttatgactggttcgacccctggggccaggga

SEQ ID NO: 2822 - protein, 43 aa, Artificial Sequence
  Description of Artificial Sequence: Synthetic antibody
ISRDYSNNTAYLQMNSLKTEDTAVYYCQYGSGSYDWFDPWGQG

SEQ ID NO: 2823 - DNA, 129 bp, Artificial Sequence
  Description of Artificial Sequence: Synthetic antibody
atctccagagatgattcaaagaacacggcgtatctgcaaatgaacagcctgaaaaccgaggacacggccgtgtattactgtcaatatggttcggggagttatgactggttcgacccctggggccaggga

SEQ ID NO: 2824 - protein, 43 aa, Artificial Sequence
  Description of Artificial Sequence: Synthetic antibody
ISRDDSKNTAYLQMNSLKTEDTAVYYCQYGSGSYDWFDPWGQG

SEQ ID NO: 2825 - DNA, 129 bp, Artificial Sequence
  Description of Artificial Sequence: Synthetic antibody
atctccagagatcattcaaacaacacggcgtatctgcaaatgaacagcctgaaaaccgaggacacggccgtgtattactgtcaatatggttcggggagttatgactggttcgacccctggggccaggga

SEQ ID NO: 2826 - protein, 43 aa, Artificial Sequence
  Description of Artificial Sequence: Synthetic antibody
ISRDHSNNTAYLQMNSLKTEDTAVYYCQYGSGSYDWFDPWGQG

SEQ ID NO: 2827 - DNA, 129 bp, Artificial Sequence
  Description of Artificial Sequence: Synthetic antibody
tctccagagatgattcaaagaaccacggcgtatctgcaaatgaacagcctgaaaaccgaggacacggccgtgtattactgtcaatatggttcggggagttatgactggttcgacccctggggccaggga

SEQ ID NO: 2828 - protein, 43 aa, Artificial Sequence
  Description of Artificial Sequence: Synthetic antibody
SPEMIQRTTAYLQMNSLKTEDTAVYYCQYGSGSYDWFDPWGQG

SEQ ID NO: 2829 - protein, 13 aa, Artificial Sequence
  Description of Artificial Sequence: Synthetic antibody
CTRPPYGDYGDYW

SEQ ID NO: 2830 - DNA, 129 bp, Artificial Sequence
  Description of Artificial Sequence: Synthetic antibody
accatctccatatatgattcaaagaacacggcgtatctgcaaatgaacagcctgaaaaccgaggacacggccgtgtattactgtactagacccccctacggtgactacggtgactactggggccaggga

SEQ ID NO: 2831 - protein, 43 aa, Artificial Sequence
  Description of Artificial Sequence: Synthetic antibody
TISIYDSKNTAYLQMNSLKTEDTAVYYCTRPPYGDYGDYWGQG

SEQ ID NO: 2832 - DNA, 129 bp, Artificial Sequence
  Description of Artificial Sequence: Synthetic antibody
accatctccatagattattcaaagaacacggcgtatctgcaaatgaacagcctgaaaaccgaggacacggccgtgtattactgtactagacccccctacggtgactacggtgactactggggccaggga

SEQ ID NO: 2833 - protein, 43 aa, Artificial Sequence
  Description of Artificial Sequence: Synthetic antibody
TISIDYSKNTAYLQMNSLKTEDTAVYYCTRPPYGDYGDYWGQG

SEQ ID NO: 2834 - DNA, 129 bp, Artificial Sequence
  Description of Artificial Sequence: Synthetic antibody
accatctccagagattattcaaagaacacggcgtatctgcaaatgaacagccttaaaaccgaggacacggccgtgtattactgtactagacccccctacggtgactacggtgactactggggccaggga

SEQ ID NO: 2835 - protein, 43 aa, Artificial Sequence
  Description of Artificial Sequence: Synthetic antibody
TISRDYSKNTAYLQMNSLKTEDTAVYYCTRPPYGDYGDYWGQG

SEQ ID NO: 2836 - DNA, 129 bp, Artificial Sequence
  Description of Artificial Sequence: Synthetic antibody
accatctccagagattattcaaacaacacggcgtatctgcaaatgaacagcctgaaaaccgaggacacggccgtgtattactgtactagacccccctacggtgactacggtgactactggggccaggga

SEQ ID NO: 2837 - protein, 43 aa, Artificial Sequence
  Description of Artificial Sequence: Synthetic antibody
TISRDYSNNTAYLQMNSLKTEDTAVYYCTRPPYGDYGDYWGQG

SEQ ID NO: 2838 - DNA, 129 bp, Artificial Sequence
  Description of Artificial Sequence: Synthetic antibody
accatctccagagatgattcaaagaacacggcgtatctgcaaatgaacagcctgaaaaccgaggacacggccgtgtattactgtactagacccccctacggtgactacggtgactactggggccaggga

SEQ ID NO: 2839 - protein, 43 aa, Artificial Sequence
  Description of Artificial Sequence: Synthetic antibody
TISRDDSKNTAYLQMNSLKTEDTAVYYCTRPPYGDYGDYWGQG

SEQ ID NO: 2840 - DNA, 129 bp, Artificial Sequence
  Description of Artificial Sequence: Synthetic antibody
aacatctccatagatgattcaaagaacacggcgtatctgcaaatgaacagcctgaaaaccgaggacacggccgtgtattactgtactagacccccctacggtgactacggtgactactggggccaggga

SEQ ID NO: 2841 - protein, 43 aa, Artificial Sequence
  Description of Artificial Sequence: Synthetic antibody
NISIDDSKNTAYLQMNSLKTEDTAVYYCTRPPYGDYGDYWGQG

SEQ ID NO: 2842 - DNA, 129 bp, Artificial Sequence
  Description of Artificial Sequence: Synthetic antibody
aacatctccagatatgattcaaagaacacggcgtatctgcaaatgaacagcctgaaaaccgaggacacggccgtgtattactgtactagacccccctacggtgactacggtgactactggggccaggga

SEQ ID NO: 2843 - protein, 43 aa, Artificial Sequence
  Description of Artificial Sequence: Synthetic antibody
NISRYDSKNTAYLQMNSLKTEDTAVYYCTRPPYGDYGDYWGQG

SEQ ID NO: 2844 - DNA, 129 bp, Artificial Sequence
  Description of Artificial Sequence: Synthetic antibody
aacatatccagagatgattcaaagaacacggcgtatctgcaaattaacagccttaaaaccgaggacacggccgtgtattactgtactagacccccctacggtgactacggtgactactggggccaggga

SEQ ID NO: 2845 - protein, 43 aa, Artificial Sequence
  Description of Artificial Sequence: Synthetic antibody
NISRDDSKNTAYLQINSLKTEDTAVYYCTRPPYGDYGDYWGQG

SEQ ID NO: 2846 - DNA, 129 bp, Artificial Sequence
  Description of Artificial Sequence: Synthetic antibody
ccatctccagagatgattcaaagaaccacggcgtatctgcaaatgaacagcctgaaaaccgaggacacggccgtgtattactgtactagacccccctacggtgactacggtgactactggggccaggga

SEQ ID NO: 2847 - protein, 43 aa, Artificial Sequence
  Description of Artificial Sequence: Synthetic antibody
PSPEMIQRTTAYLQMNSLKTEDTAVYYCTRPPYGDYGDYWGQG

SEQ ID NO: 2848 - protein, 14 aa, Artificial Sequence
  Description of Artificial Sequence: Synthetic antibody
CAREPTGGRLFDYW

SEQ ID NO: 2849 - DNA, 129 bp, Artificial Sequence
  Description of Artificial Sequence: Synthetic antibody
atcaacccagacacagccaagaaccaattctccctgcagctggactctgtgactcccgaggacacggctgtgtattactgtgcaagagaaccgactgggggccgactctttgactactggggccaggga

SEQ ID NO: 2850 - protein, 43 aa, Artificial Sequence
  Description of Artificial Sequence: Synthetic antibody
INPDTAKNQFSLQLDSVTPEDTAVYYCAREPTGGRLFDYWGQG

SEQ ID NO: 2851 - DNA, 129 bp, Artificial Sequence
  Description of Artificial Sequence: Synthetic antibody
atcaacccagacacagccaacaaccaattctccctgcagctggactctgtgactcccgaggacacggctgtgtattactgtgcaagagaaccgactgggggccgactctttgactactggggccaggga

SEQ ID NO: 2852 - protein, 43 aa, Artificial Sequence
  Description of Artificial Sequence: Synthetic antibody
INPDTANNQFSLQLDSVTPEDTAVYYCAREPTGGRLFDYWGQG

SEQ ID NO: 2853 - DNA, 129 bp, Artificial Sequence
  Description of Artificial Sequence: Synthetic antibody
atcaacccagacacagccaacaacaaattctccctgcagctggactctgtgactcccgaggacacggctgtgtattactgtgcaagagaaccgactgggggccgactctttgactactggggccaggga

SEQ ID NO: 2854 - protein, 43 aa, Artificial Sequence
  Description of Artificial Sequence: Synthetic antibody
INPDTANNKFSLQLDSVTPEDTAVYYCAREPTGGRLFDYWGQG

SEQ ID NO: 2855 - DNA, 129 bp, Artificial Sequence
  Description of Artificial Sequence: Synthetic antibody
atcaacccagacacacccaacaaccaattctccctgcagctggactctgtgactcccgaggacacggctgtgtattactgtgcaagagaaccgactgggggccgactctttgactactggggccaggga

SEQ ID NO: 2856 - protein, 43 aa, Artificial Sequence
  Description of Artificial Sequence: Synthetic antibody
INPDTPNNQFSLQLDSVTPEDTAVYYCAREPTGGRLFDYWGQG

SEQ ID NO: 2857 - DNA, 129 bp, Artificial Sequence
  Description of Artificial Sequence: Synthetic antibody
atcaacccacacacagccaagaaccaattctccctgcagctggactctgtgactcccgaggacacggctgtgtattactgtgcaagagaaccgactgggggccgactctttgactactggggccaggga

SEQ ID NO: 2858 - protein, 43 aa, Artificial Sequence
  Description of Artificial Sequence: Synthetic antibody
INPHTAKNQFSLQLDSVTPEDTAVYYCAREPTGGRLFDYWGQG

SEQ ID NO: 2859 - DNA, 129 bp, Artificial Sequence
  Description of Artificial Sequence: Synthetic antibody
atcaacccacacacagccaacaaccaattctccctgcagctggactctgtgactcccgaggacacggctgtgtattactgtgcaagagaaccgactgggggccgactctttgactactggggccaggga

SEQ ID NO: 2860 - protein, 43 aa, Artificial Sequence
  Description of Artificial Sequence: Synthetic antibody
INPHTANNQFSLQLDSVTPEDTAVYYCAREPTGGRLFDYWGQG

SEQ ID NO: 2861 - DNA, 129 bp, Artificial Sequence
  Description of Artificial Sequence: Synthetic antibody
atcaacccacacacacccaagaaccaattctccctgcagctggactctgtgactcccgaggacacggctgtgtattactgtgcaagagaaccgactgggggccgactctttgactactggggccaggga

SEQ ID NO: 2862 - protein, 43 aa, Artificial Sequence
  Description of Artificial Sequence: Synthetic antibody
INPHTPKNQFSLQLDSVTPEDTAVYYCAREPTGGRLFDYWGQG

SEQ ID NO: 2863 - DNA, 129 bp, Artificial Sequence
  Description of Artificial Sequence: Synthetic antibody
atcaacccacacacacccaacaaccaattctccctgcagctggactctgtgactcccgaggacacggctgtgtattactgtgcaagagaaccgactgggggccgactctttgactactggggccaggga

SEQ ID NO: 2864 - protein, 43 aa, Artificial Sequence
  Description of Artificial Sequence: Synthetic antibody
INPHTPNNQFSLQLDSVTPEDTAVYYCAREPTGGRLFDYWGQG

SEQ ID NO: 2865 - protein, 13 aa, Artificial Sequence
  Description of Artificial Sequence: Synthetic antibody
CAHSVLTPTFAYW

SEQ ID NO: 2866 - DNA, 129 bp, Artificial Sequence
  Description of Artificial Sequence: Synthetic antibody
caccatcaccaaggacgactccaaaaccaggtggtcctgacattgaccaacctggaccctgtggacacagccacatatttctgtgcacattcggtgcttacgccgacttttgcctattggggccaggga

SEQ ID NO: 2867 - protein, 43 aa, Artificial Sequence
  Description of Artificial Sequence: Synthetic antibody
HHHQGRLQNQVVLTLTNLDPVDTATYFCAHSVLTPTFAYWGQG

SEQ ID NO: 2868 - DNA, 129 bp, Artificial Sequence
  Description of Artificial Sequence: Synthetic antibody
accatcaccatgcacgactccaaaaaccaggtggtcctgacattgaccaacctggaccctgtggacacagccacatatttctgtgcacattcggtgcttacgccgacttttgcctattggggccaggga

SEQ ID NO: 2869 - protein, 43 aa, Artificial Sequence
  Description of Artificial Sequence: Synthetic antibody
TITMHDSKNQVVLTLTNLDPVDTATYFCAHSVLTPTFAYWGQG

SEQ ID NO: 2870 - DNA, 129 bp, Artificial Sequence
  Description of Artificial Sequence: Synthetic antibody
accatcaccacggacgactccaaaaaccaggtggtcctgacattgaccaacctggaccctgtggacacagccacatatttctgtgcacattcggtgcttacgccgacttttgcctattggggccaggga

SEQ ID NO: 2871 - protein, 43 aa, Artificial Sequence
  Description of Artificial Sequence: Synthetic antibody
TITTDDSKNQVVLTLTNLDPVDTATYFCAHSVLTPTFAYWGQG

SEQ ID NO: 2872 - DNA, 129 bp, Artificial Sequence
  Description of Artificial Sequence: Synthetic antibody
accatcaccacgcacgactccaaaaaccaggtggtcctgacattgaccaacctggaccctgtggacacagccacatatttctgtgcacattcggtgcttacgccgacttttgcctattggggccaggga

SEQ ID NO: 2873 - protein, 43 aa, Artificial Sequence
  Description of Artificial Sequence: Synthetic antibody
TITTHDSKNQVVLTLTNLDPVDTATYFCAHSVLTPTFAYWGQG

SEQ ID NO: 2874 - DNA, 129 bp, Artificial Sequence
  Description of Artificial Sequence: Synthetic antibody
accatcaccaaggacgactccaaaaaccaggtggtcctgacattgaccaacctggaccctgtggacacagccacatatttctgtgcacattcggtgcttacgccgacttttgcctattggggccaggga

SEQ ID NO: 2875 - protein, 43 aa, Artificial Sequence
  Description of Artificial Sequence: Synthetic antibody
TITKDDSKNQVVLTLTNLDPVDTATYFCAHSVLTPTFAYWGQG

SEQ ID NO: 2876 - DNA, 129 bp, Artificial Sequence
  Description of Artificial Sequence: Synthetic antibody
accaaccccacggacgactccaaaaaccaggtggtcctgacattgaccaacctggaccctgtggacacagccacatatttctgtgcacattcggtgcttacgccgacttttgcctattggggccaggga

SEQ ID NO: 2877 - protein, 43 aa, Artificial Sequence
  Description of Artificial Sequence: Synthetic antibody
TNPTDDSKNQVVLTLTNLDPVDTATYFCAHSVLTPTFAYWGQG

SEQ ID NO: 2878 - DNA, 129 bp, Artificial Sequence
  Description of Artificial Sequence: Synthetic antibody
accaacaccatgcacgactccaaaaaccaggtggtcctgacattgaccaacctggaccctgtggacacagccacatatttctgtgcacattcggtgcttacgccgacttttgcctattggggccaggga

SEQ ID NO: 2879 - protein, 43 aa, Artificial Sequence
  Description of Artificial Sequence: Synthetic antibody
TNTMHDSKNQVVLTLTNLDPVDTATYFCAHSVLTPTFAYWGQG

SEQ ID NO: 2880 - DNA, 129 bp, Artificial Sequence
  Description of Artificial Sequence: Synthetic antibody
ccatcaccaaggcacgactccaaaaaccaggtggtcctgacattgaccaacctggaccctgtggacacagccacatatttctgtgcacattcggtgcttacgccgacttttgcctattggggccaggga

SEQ ID NO: 2881 - protein, 43 aa, Artificial Sequence
  Description of Artificial Sequence: Synthetic antibody
PSPRHDSKNQVVLTLTNLDPVDTATYFCAHSVLTPTFAYWGQG

SEQ ID NO: 2882 - protein, 11 aa, Artificial Sequence
  Description of Artificial Sequence: Synthetic antibody
CAKDSGGNDYW

SEQ ID NO: 2883 - DNA, 129 bp, Artificial Sequence
  Description of Artificial Sequence: Synthetic antibody
cggttcaccatctccagatataattccaagaacacgctgtatctgcaaatgaacagcctgagagccgaggacacggccgtatattactgtgcgaaagattcgggggggaatgactactggggccaggga

SEQ ID NO: 2884 - protein, 43 aa, Artificial Sequence
  Description of Artificial Sequence: Synthetic antibody
RFTISRYNSKNTLYLQMNSLRAEDTAVYYCAKDSGGNDYWGQG

SEQ ID NO: 2885 - DNA, 129 bp, Artificial Sequence
  Description of Artificial Sequence: Synthetic antibody
cggttcaccatctccagatataattccaagaacacgctgtatctgcaaatcaacagcctgagagccgaggacacggccgtatattactgtgcgaaagattcgggggggaatgactactggggccaggga

SEQ ID NO: 2886 - protein, 43 aa, Artificial Sequence
  Description of Artificial Sequence: Synthetic antibody
RFTISRYNSKNTLYLQINSLRAEDTAVYYCAKDSGGNDYWGQG

SEQ ID NO: 2887 - DNA, 129 bp, Artificial Sequence
  Description of Artificial Sequence: Synthetic antibody
cggttcaccatctccagagataattccaagaacacgctgtatctgcaaatgaacagcctgagagccgaggacacggccgtatattactgtgcgaaagattcgggggggaatgactactggggccaggga

SEQ ID NO: 2888 - protein, 43 aa, Artificial Sequence
  Description of Artificial Sequence: Synthetic antibody
RFTISRDNSKNTLYLQMNSLRAEDTAVYYCAKDSGGNDYWGQG

SEQ ID NO: 2889 - DNA, 129 bp, Artificial Sequence
  Description of Artificial Sequence: Synthetic antibody
cggttcaccatctccagagataattccaagaacacgctgtatctgcaaatcaacagcctgagagccgaggacacggccgtatattactgtgcgaaagattcgggggggaatgactactggggccaggga

SEQ ID NO: 2890 - protein, 43 aa, Artificial Sequence
  Description of Artificial Sequence: Synthetic antibody
RFTISRDNSKNTLYLQINSLRAEDTAVYYCAKDSGGNDYWGQG

SEQ ID NO: 2891 - DNA, 129 bp, Artificial Sequence
  Description of Artificial Sequence: Synthetic antibody
cggttcaccatctccagagataattccaacaacacgctgtatctgcaaatgaacagcctgagagccgaggacacggccgtatattactgtgcgaaagattcgggggggaatgactactggggccaggga

SEQ ID NO: 2892 - protein, 43 aa, Artificial Sequence
  Description of Artificial Sequence: Synthetic antibody
RFTISRDNSNNTLYLQMNSLRAEDTAVYYCAKDSGGNDYWGQG

SEQ ID NO: 2893 - DNA, 129 bp, Artificial Sequence
  Description of Artificial Sequence: Synthetic antibody
cggttcaccatctccagacataattccaagaacacgctgtatctgcaaatgaacagcctgagagccgaggacacggccgtatattactgtgcgaaagattcgggggggaatgactactggggccaggga

SEQ ID NO: 2894 - protein, 43 aa, Artificial Sequence
  Description of Artificial Sequence: Synthetic antibody
RFTISRHNSKNTLYLQMNSLRAEDTAVYYCAKDSGGNDYWGQG

SEQ ID NO: 2895 - DNA, 129 bp, Artificial Sequence
  Description of Artificial Sequence: Synthetic antibody
cggttcaccatctccagacataattccaagaacacgctgtatctgcaaatcaacagcctgagagccgaggacacggccgtatattactgtgcgaaagattcgggggggaatgactactggggccaggga

SEQ ID NO: 2896 - protein, 43 aa, Artificial Sequence
  Description of Artificial Sequence: Synthetic antibody
RFTISRHNSKNTLYLQINSLRAEDTAVYYCAKDSGGNDYWGQG

SEQ ID NO: 2897 - DNA, 129 bp, Artificial Sequence
  Description of Artificial Sequence: Synthetic antibody
cggttcaccatctccagacataaatccaagaacacgctgtatctgcaaatgaacagcctgagagccgaggacacggccgtatattactgtgcgaaagattcgggggggaatgactactggggccaggga

SEQ ID NO: 2898 - protein, 43 aa, Artificial Sequence
  Description of Artificial Sequence: Synthetic antibody
RFTISRHKSKNTLYLQMNSLRAEDTAVYYCAKDSGGNDYWGQG

SEQ ID NO: 2899 - protein, 27 aa, Artificial Sequence
  Description of Artificial Sequence: Synthetic antibody
CAKEGGVYCSGGSCYSDDYYYYGMDVW

SEQ ID NO: 2900 - DNA, 129 bp, Artificial Sequence
  Description of Artificial Sequence: Synthetic antibody
ttgaacagcctgagagccgaggacacggccgtatattactgtgcgaaagaggggggggtatattgtagtggtggtagctgctactccgacgattactactactacggtatggacgtctggggccaaggg

SEQ ID NO: 2901 - protein, 43 aa, Artificial Sequence
  Description of Artificial Sequence: Synthetic antibody
LNSLRAEDTAVYYCAKEGGVYCSGGSCYSDDYYYYGMDVWGQG

SEQ ID NO: 2902 - DNA, 129 bp, Artificial Sequence
  Description of Artificial Sequence: Synthetic antibody
ttcaacagcctcagagccgaggacacggccgtatattactgtgcgaaagaggggggtgtatattgtagtggtggtagctgctactccgacgattactactactacggtatggacgtctggggccaaggg

SEQ ID NO: 2903 - protein, 43 aa, Artificial Sequence
  Description of Artificial Sequence: Synthetic antibody
FNSLRAEDTAVYYCAKEGGVYCSGGSCYSDDYYYYGMDVWGQG

SEQ ID NO: 2904 - DNA, 129 bp, Artificial Sequence
  Description of Artificial Sequence: Synthetic antibody
atgaaccgcctgcgagccgaggacacggccgtatattactgtgcgaaagaggggggggtatattgtagtggtggtagctgctactccgacgattactactactacggtatggacgtctggggccaaggg

SEQ ID NO: 2905 - protein, 43 aa, Artificial Sequence
  Description of Artificial Sequence: Synthetic antibody
MNRLRAEDTAVYYCAKEGGVYCSGGSCYSDDYYYYGMDVWGQG

SEQ ID NO: 2906 - DNA, 129 bp, Artificial Sequence
  Description of Artificial Sequence: Synthetic antibody
atgaaccgcctgagagccgaggacacggccgtatattactgtgcgaaagaggggggggtatattgtagtggtggtagctgctactccgacgattactactactacggtatggacgtctggggccaaggg

SEQ ID NO: 2907 - DNA, 129 bp, Artificial Sequence
  Description of Artificial Sequence: Synthetic antibody
atgaacagcctgcgagccgaggacacggccgtatattactgtgcgaaagaggggggggtatattgtagtggtggtagctgctactccgacgattactactactacggtatggacgtctggggccaaggg

SEQ ID NO: 2908 - protein, 43 aa, Artificial Sequence
  Description of Artificial Sequence: Synthetic antibody
MNSLRAEDTAVYYCAKEGGVYCSGGSCYSDDYYYYGMDVWGQG

SEQ ID NO: 2909 - DNA, 129 bp, Artificial Sequence
  Description of Artificial Sequence: Synthetic antibody
atgaacagcctgagagccgaggacacggccgtatattactgtgcgaaagaggggggtgtatattgtagtggtggtagctgctactccgacgattactactactacggtatggacgtctggggccaaggg

SEQ ID NO: 2910 - DNA, 129 bp, Artificial Sequence
  Description of Artificial Sequence: Synthetic antibody
atgaacagcctgagagccgaggacacggccgtatattactgtgcgaaagaggggggggtatattgtagtggtggtagctgctactccgacgattactactactacggtatggacgtctggggccaaggg

SEQ ID NO: 2911 - DNA, 129 bp, Artificial Sequence
  Description of Artificial Sequence: Synthetic antibody
atcaacaccctgagcgccgaggacacggccgtatattactgtgcgaaagaggggggggtatattgtagtggtggtagctgctactccgacgattactactactacggtatggacgtctggggccaaggg

SEQ ID NO: 2912 - protein, 43 aa, Artificial Sequence
  Description of Artificial Sequence: Synthetic antibody
INTLSAEDTAVYYCAKEGGVYCSGGSCYSDDYYYYGMDVWGQG

SEQ ID NO: 2913 - protein, 15 aa, Artificial Sequence
  Description of Artificial Sequence: Synthetic antibody
CVKTQNKWGGAFDIW

SEQ ID NO: 2914 - DNA, 129 bp, Artificial Sequence
  Description of Artificial Sequence: Synthetic antibody
tccagtcacaacaccaagaactccctatatctgcaaatgaacagtctgagacctgaggacacggccttctattactgtgtaaaaacacaaaataagtgggggggtgcttttgatatctggggcctaggg

SEQ ID NO: 2915 - protein, 43 aa, Artificial Sequence
  Description of Artificial Sequence: Synthetic antibody
SSHNTKNSLYLQMNSLRPEDTAFYYCVKTQNKWGGAFDIWGLG

SEQ ID NO: 2916 - DNA, 129 bp, Artificial Sequence
  Description of Artificial Sequence: Synthetic antibody
tccagagacaacaccaagaactccctatatctgcaaatgaacagtctgagacctgaggacacggccttctattactgtgtaaaaacacaaaataagtgggggggtgcttttgatatctggggcctaggg

SEQ ID NO: 2917 - protein, 43 aa, Artificial Sequence
  Description of Artificial Sequence: Synthetic antibody
SRDNTKNSLYLQMNSLRPEDTAFYYCVKTQNKWGGAFDIWGLG

SEQ ID NO: 2918 - DNA, 129 bp, Artificial Sequence
  Description of Artificial Sequence: Synthetic antibody
tccagacacaacaccaagaactccctatatctgcaaatgaacagtctgagacctgaggacacggccttctattactgtgtaaaaacacaaaataagtgggggggtgcttttgatatctggggcctaggg

SEQ ID NO: 2919 - protein, 43 aa, Artificial Sequence
  Description of Artificial Sequence: Synthetic antibody
SRHNTKNSLYLQMNSLRPEDTAFYYCVKTQNKWGGAFDIWGLG

SEQ ID NO: 2920 - DNA, 129 bp, Artificial Sequence
  Description of Artificial Sequence: Synthetic antibody
tccagacacaacaccaagaactccctatatctgcaaatgaacaggctgagacctgaggacacggccttctattactgtgtaaaaacacaaaataagtgggggggtgcttttgatatctggggcctaggg

SEQ ID NO: 2921 - protein, 43 aa, Artificial Sequence
  Description of Artificial Sequence: Synthetic antibody
SRHNTKNSLYLQMNRLRPEDTAFYYCVKTQNKWGGAFDIWGLG

SEQ ID NO: 2922 - DNA, 129 bp, Artificial Sequence
  Description of Artificial Sequence: Synthetic antibody
tccacagacaacaccaagaactccctatatctgcaaatgaacaggctgagacctgaggacacggccttctattactgtgtaaaaacacaaaataagtgggggggtgcttttgatatctggggcctaggg

SEQ ID NO: 2923 - protein, 43 aa, Artificial Sequence
  Description of Artificial Sequence: Synthetic antibody
STDNTKNSLYLQMNRLRPEDTAFYYCVKTQNKWGGAFDIWGLG

SEQ ID NO: 2924 - DNA, 129 bp, Artificial Sequence
  Description of Artificial Sequence: Synthetic antibody
tccagagacaacgccaagaactccctgtatctgcaaatgaacagtctgagagctgaggacacggccttgtattactgtgtaaaaacacaaaataagtgggggggtgcttttgatatctggggcctaggg

SEQ ID NO: 2925 - protein, 43 aa, Artificial Sequence
  Description of Artificial Sequence: Synthetic antibody
SRDNAKNSLYLQMNSLRAEDTALYYCVKTQNKWGGAFDIWGLG

SEQ ID NO: 2926 - DNA, 129 bp, Artificial Sequence
  Description of Artificial Sequence: Synthetic antibody
tccagagacaacaccaagaactccctatatctgcaaatgaacagtctgagatctgaggacacggccttctattactgtgtaaaaacacaaaataagtgggggggtgcttttgatatctggggcctaggg

SEQ ID NO: 2927 - protein, 43 aa, Artificial Sequence
  Description of Artificial Sequence: Synthetic antibody
SRDNTKNSLYLQMNSLRSEDTAFYYCVKTQNKWGGAFDIWGLG

SEQ ID NO: 2928 - protein, 14 aa, Artificial Sequence
  Description of Artificial Sequence: Synthetic antibody
CTRQDYGSGKEDVW

SEQ ID NO: 2929 - DNA, 129 bp, Artificial Sequence
  Description of Artificial Sequence: Synthetic antibody
atctccatatatgattcaaagaacacggcgtatctgcaaatgaacagcctgaaaaccgaggacacggccgtgtattactgtactagacaagactatggttcagggaaagaggacgtctggggccaaggg

SEQ ID NO: 2930 - protein, 43 aa, Artificial Sequence
  Description of Artificial Sequence: Synthetic antibody
ISIYDSKNTAYLQMNSLKTEDTAVYYCTRQDYGSGKEDVWGQG

SEQ ID NO: 2931 - DNA, 129 bp, Artificial Sequence
  Description of Artificial Sequence: Synthetic antibody
atctccatagatcattcaaacaacacggcgtatctgcaaatgaacagcctgaaaaccgaggacacggccgtgtattactgtactagacaagactatggttcagggaaagaggacgtctggggccaaggg

SEQ ID NO: 2932 - protein, 43 aa, Artificial Sequence
  Description of Artificial Sequence: Synthetic antibody
ISIDHSNNTAYLQMNSLKTEDTAVYYCTRQDYGSGKEDVWGQG

SEQ ID NO: 2933 - DNA, 129 bp, Artificial Sequence
  Description of Artificial Sequence: Synthetic antibody
atctccagatttgattcaaagaacacggcgtatctgcaaatgaacagcctgaaaaccgaggacacggccgtgtattactgtactagacaagactatggttcagggaaagaggacgtctggggccaaggg

SEQ ID NO: 2934 - protein, 43 aa, Artificial Sequence
  Description of Artificial Sequence: Synthetic antibody
ISRFDSKNTAYLQMNSLKTEDTAVYYCTRQDYGSGKEDVWGQG

SEQ ID NO: 2935 - DNA, 129 bp, Artificial Sequence
  Description of Artificial Sequence: Synthetic antibody
atctccagagattattcaaacaacacggcgtatctgcaaatgaacagcctgaaaaccgaggacacggccgtgtattactgtactagacaagactatggttcagggaaagaggacgtctggggccaaggg

SEQ ID NO: 2936 - protein, 43 aa, Artificial Sequence
  Description of Artificial Sequence: Synthetic antibody
ISRDYSNNTAYLQMNSLKTEDTAVYYCTRQDYGSGKEDVWGQG

SEQ ID NO: 2937 - DNA, 129 bp, Artificial Sequence
  Description of Artificial Sequence: Synthetic antibody
atctccagagatgattcaaagaacacggcgtatctgcaaatgaacagcctgaaaaccgaggacacggccgtgtattactgtactagacaagactatggttcagggaaagaggacgtctggggccaaggg

SEQ ID NO: 2938 - protein, 43 aa, Artificial Sequence
  Description of Artificial Sequence: Synthetic antibody
ISRDDSKNTAYLQMNSLKTEDTAVYYCTRQDYGSGKEDVWGQG

SEQ ID NO: 2939 - DNA, 129 bp, Artificial Sequence
  Description of Artificial Sequence: Synthetic antibody
atctccagagatcattcaaacaacacggcgtatctgcaaatgaacagcctgaaaaccgaggacacggccgtgtattactgtactagacaagactatggttcagggaaagaggacgtctggggccaaggg

SEQ ID NO: 2940 - protein, 43 aa, Artificial Sequence
  Description of Artificial Sequence: Synthetic antibody
ISRDHSNNTAYLQMNSLKTEDTAVYYCTRQDYGSGKEDVWGQG

SEQ ID NO: 2941 - DNA, 129 bp, Artificial Sequence
  Description of Artificial Sequence: Synthetic antibody
atctccagacatcattcaaagaacacggcgtatctgcaaatgaacagcctgaaaaccgaggacacggccgtgtattactgtactagacaagactatggttcagggaaagaggacgtctggggccaaggg

SEQ ID NO: 2942 - protein, 43 aa, Artificial Sequence
  Description of Artificial Sequence: Synthetic antibody
ISRHHSKNTAYLQMNSLKTEDTAVYYCTRQDYGSGKEDVWGQG

SEQ ID NO: 2943 - protein, 13 aa, Artificial Sequence
  Description of Artificial Sequence: Synthetic antibody
CTLSWDYGSGSVW

SEQ ID NO: 2944 - DNA, 129 bp, Artificial Sequence
  Description of Artificial Sequence: Synthetic antibody
accatctccatagattattcaaagaacacggcgtatctgcaaatgaacagcctgaaaaccgaggacacggccgtgtattactgtactctctcctgggactatggttcggggagtgtctggggccaaggg

SEQ ID NO: 2945 - protein, 43 aa, Artificial Sequence
  Description of Artificial Sequence: Synthetic antibody
TISIDYSKNTAYLQMNSLKTEDTAVYYCTLSWDYGSGSVWGQG

SEQ ID NO: 2946 - DNA, 129 bp, Artificial Sequence
  Description of Artificial Sequence: Synthetic antibody
accatctccagagattattcaaagaacacggcgtatctgcaaatgaacagccttaaaaccgaggacacggccgtgtattactgtactctctcctgggactatggttcggggagtgtctggggccaaggg

SEQ ID NO: 2947 - protein, 43 aa, Artificial Sequence
  Description of Artificial Sequence: Synthetic antibody
TISRDYSKNTAYLQMNSLKTEDTAVYYCTLSWDYGSGSVWGQG

SEQ ID NO: 2948 - DNA, 129 bp, Artificial Sequence
  Description of Artificial Sequence: Synthetic antibody
accatctccagagatgattcaaagaacacggcgtatctgcaaatgaacagcctgaaaaccgaggacacggccgtgtattactgtactctctcctgggactatggttcggggagtgtctggggccaaggg

SEQ ID NO: 2949 - protein, 43 aa, Artificial Sequence
  Description of Artificial Sequence: Synthetic antibody
TISRDDSKNTAYLQMNSLKTEDTAVYYCTLSWDYGSGSVWGQG

SEQ ID NO: 2950 - DNA, 129 bp, Artificial Sequence
  Description of Artificial Sequence: Synthetic antibody
accatctccagacattattcaaagaacacggcgtatctgcaaatgaacagcctgaaaaccgaggacacggccgtgtattactgtactctctcctgggactatggttcggggagtgtctggggccaaggg

SEQ ID NO: 2951 - protein, 43 aa, Artificial Sequence
  Description of Artificial Sequence: Synthetic antibody
TISRHYSKNTAYLQMNSLKTEDTAVYYCTLSWDYGSGSVWGQG

SEQ ID NO: 2952 - DNA, 129 bp, Artificial Sequence
  Description of Artificial Sequence: Synthetic antibody
accatctccagacatcattcaaagaacacggcgtatctgcaaatgaacagcctgaaaaccgaggacacggccgtgtattactgtactctctcctgggactatggttcggggagtgtctggggccaaggg

SEQ ID NO: 2953 - protein, 43 aa, Artificial Sequence
  Description of Artificial Sequence: Synthetic antibody
TISRHHSKNTAYLQMNSLKTEDTAVYYCTLSWDYGSGSVWGQG

SEQ ID NO: 2954 - DNA, 129 bp, Artificial Sequence
  Description of Artificial Sequence: Synthetic antibody
aacatctccatagatgattcaaagaacacggcgtatctgcaaatgaacagcctgaaaaccgaggacacggccgtgtattactgtactctctcctgggactatggttcggggagtgtctggggccaaggg

SEQ ID NO: 2955 - protein, 43 aa, Artificial Sequence
  Description of Artificial Sequence: Synthetic antibody
NISIDDSKNTAYLQMNSLKTEDTAVYYCTLSWDYGSGSVWGQG

SEQ ID NO: 2956 - DNA, 129 bp, Artificial Sequence
  Description of Artificial Sequence: Synthetic antibody
aacatctccagagatcattcaaagaacacggcgtatctgcaaatgaacagcctgaaaaccgaggacacggccgtgtattactgtactctctcctgggactatggttcggggagtgtctggggccaaggg

SEQ ID NO: 2957 - protein, 43 aa, Artificial Sequence
  Description of Artificial Sequence: Synthetic antibody
NISRDHSKNTAYLQMNSLKTEDTAVYYCTLSWDYGSGSVWGQG

SEQ ID NO: 2958 - protein, 14 aa, Artificial Sequence
  Description of Artificial Sequence: Synthetic antibody
CTSTWGGYYGMDVW

SEQ ID NO: 2959 - DNA, 129 bp, Artificial Sequence
  Description of Artificial Sequence: Synthetic antibody
ttctccagagattattcaaagaacacggcgtatctgcaaatgaacagcctgaaaaccgaggacacggccgtgtattactgtactagtacgtggggaggctactacggtatggacgtctggggccaaggg

SEQ ID NO: 2960 - protein, 43 aa, Artificial Sequence
  Description of Artificial Sequence: Synthetic antibody
FSRDYSKNTAYLQMNSLKTEDTAVYYCTSTWGGYYGMDVWGQG

SEQ ID NO: 2961 - DNA, 129 bp, Artificial Sequence
  Description of Artificial Sequence: Synthetic antibody
ttctccagagatcattcaaagaacacggcgtatctgcaaatgaacagcctgaaaaccgaggacacggccgtgtattactgtactagtacgtggggaggctactacggtatggacgtctggggccaaggg

SEQ ID NO: 2962 - protein, 43 aa, Artificial Sequence
  Description of Artificial Sequence: Synthetic antibody
FSRDHSKNTAYLQMNSLKTEDTAVYYCTSTWGGYYGMDVWGQG

SEQ ID NO: 2963 - DNA, 129 bp, Artificial Sequence
  Description of Artificial Sequence: Synthetic antibody
atctccatagatgattcaaacaacacggcgtatctgcaaatgaacagcctgaaaaccgaggacacggccgtgtattactgtactagtacgtggggaggctactacggtatggacgtctggggccaaggg

SEQ ID NO: 2964 - protein, 43 aa, Artificial Sequence
  Description of Artificial Sequence: Synthetic antibody
ISIDDSNNTAYLQMNSLKTEDTAVYYCTSTWGGYYGMDVWGQG

SEQ ID NO: 2965 - DNA, 129 bp, Artificial Sequence
  Description of Artificial Sequence: Synthetic antibody
atctccatagatcattcaaagaacacggcgtatctgcaaatgaacagcctgaaaaccgaggacacggccgtgtattactgtactagtacgtggggaggctactacggtatggacgtctggggccaaggg

SEQ ID NO: 2966 - protein, 43 aa, Artificial Sequence
  Description of Artificial Sequence: Synthetic antibody
ISIDHSKNTAYLQMNSLKTEDTAVYYCTSTWGGYYGMDVWGQG

SEQ ID NO: 2967 - DNA, 129 bp, Artificial Sequence
  Description of Artificial Sequence: Synthetic antibody
atctccagagatgattcaaagaacacggcgtatctgcaaatgaacagcctgaaaaccgaggacacggccgtgtattactgtactagtacgtggggaggctactacggtatggacgtctggggccaaggg

SEQ ID NO: 2968 - protein, 43 aa, Artificial Sequence
  Description of Artificial Sequence: Synthetic antibody
ISRDDSKNTAYLQMNSLKTEDTAVYYCTSTWGGYYGMDVWGQG

SEQ ID NO: 2969 - DNA, 129 bp, Artificial Sequence
  Description of Artificial Sequence: Synthetic antibody
atctccagagatcattcaaacaacacggcgtatctgcaaatgaacagcctgaaaaccgaggacacggccgtgtattactgtactagtacgtggggaggctactacggtatggacgtctggggccaaggg

SEQ ID NO: 2970 - protein, 43 aa, Artificial Sequence
  Description of Artificial Sequence: Synthetic antibody
ISRDHSNNTAYLQMNSLKTEDTAVYYCTSTWGGYYGMDVWGQG

SEQ ID NO: 2971 - DNA, 129 bp, Artificial Sequence
  Description of Artificial Sequence: Synthetic antibody
atctccagacatcattcaaagaacacggcgtatctgcaaatgaacagcctgaaaaccgaggacacggccgtgtattactgtactagtacgtggggaggctactacggtatggacgtctggggccaaggg

SEQ ID NO: 2972 - protein, 43 aa, Artificial Sequence
  Description of Artificial Sequence: Synthetic antibody
ISRHHSKNTAYLQMNSLKTEDTAVYYCTSTWGGYYGMDVWGQG

SEQ ID NO: 2973 - protein, 13 aa, Artificial Sequence
  Description of Artificial Sequence: Synthetic antibody
CAKVEAPYYFDYW

SEQ ID NO: 2974 - DNA, 129 bp, Artificial Sequence
  Description of Artificial Sequence: Synthetic antibody
accatctccatatataattccaagaacacgctgtatcttcaaatgaacagcctgagagccgaggacacggccgtatattactgtgcgaaagtcgaggccccgtactactttgactactggggccaggga

SEQ ID NO: 2975 - protein, 43 aa, Artificial Sequence
  Description of Artificial Sequence: Synthetic antibody
TISIYNSKNTLYLQMNSLRAEDTAVYYCAKVEAPYYFDYWGQG

SEQ ID NO: 2976 - DNA, 129 bp, Artificial Sequence
  Description of Artificial Sequence: Synthetic antibody
accatctccatagataattccaagaacacgctgtatcttcaaatgaacagcctgagagccgaggacacggccgtatattactgtgcgaaagtcgaggccccgtactactttgactactggggccaggga

SEQ ID NO: 2977 - protein, 43 aa, Artificial Sequence
  Description of Artificial Sequence: Synthetic antibody
TISIDNSKNTLYLQMNSLRAEDTAVYYCAKVEAPYYFDYWGQG

SEQ ID NO: 2978 - DNA, 129 bp, Artificial Sequence
  Description of Artificial Sequence: Synthetic antibody
accatctccatacataattccaagaacacgctgtatcttcaaatgaacagcctgagagccgaggacacggccgtatattactgtgcgaaagtcgaggccccgtactactttgactactggggccaggga

SEQ ID NO: 2979 - protein, 43 aa, Artificial Sequence
  Description of Artificial Sequence: Synthetic antibody
TISIHNSKNTLYLQMNSLRAEDTAVYYCAKVEAPYYFDYWGQG

SEQ ID NO: 2980 - DNA, 129 bp, Artificial Sequence
  Description of Artificial Sequence: Synthetic antibody
accatctccagatataattccaagaacacgctgtatcttcaaatgaacagcctgagagccgaggacacggccgtatattactgtgcgaaagtcgaggccccgtactactttgactactggggccaggga

SEQ ID NO: 2981 - protein, 43 aa, Artificial Sequence
  Description of Artificial Sequence: Synthetic antibody
TISRYNSKNTLYLQMNSLRAEDTAVYYCAKVEAPYYFDYWGQG

SEQ ID NO: 2982 - DNA, 129 bp, Artificial Sequence
  Description of Artificial Sequence: Synthetic antibody
accatctccagagataattccaagaacacgctgtatcttcaaatgaacagcctgagagccgaggacacggccgtatattactgtgcgaaagtcgaggccccgtactactttgactactggggccaggga

SEQ ID NO: 2983 - protein, 43 aa, Artificial Sequence
  Description of Artificial Sequence: Synthetic antibody
TISRDNSKNTLYLQMNSLRAEDTAVYYCAKVEAPYYFDYWGQG

SEQ ID NO: 2984 - DNA, 129 bp, Artificial Sequence
  Description of Artificial Sequence: Synthetic antibody
aacatctccatatataattccaagaacacgctgtatcttcaaatgaacagcctgagagccgaggacacggccgtatattactgtgcgaaagtcgaggccccgtactactttgactactggggccaggga

SEQ ID NO: 2985 - protein, 43 aa, Artificial Sequence
  Description of Artificial Sequence: Synthetic antibody
NISIYNSKNTLYLQMNSLRAEDTAVYYCAKVEAPYYFDYWGQG

SEQ ID NO: 2986 - DNA, 129 bp, Artificial Sequence
  Description of Artificial Sequence: Synthetic antibody
aacatctccatagataattccaagaacacgctgtatcttcaaatgaacagcctgagagccgaggacacggccgtatattactgtgcgaaagtcgaggccccgtactactttgactactggggccaggga

SEQ ID NO: 2987 - protein, 43 aa, Artificial Sequence
  Description of Artificial Sequence: Synthetic antibody
NISIDNSKNTLYLQMNSLRAEDTAVYYCAKVEAPYYFDYWGQG

SEQ ID NO: 2988 - protein, 12 aa, Artificial Sequence
  Description of Artificial Sequence: Synthetic antibody
CGRGGLYGLNYW

SEQ ID NO: 2989 - DNA, 129 bp, Artificial Sequence
  Description of Artificial Sequence: Synthetic antibody
atcaccatgaccacagacacatccacgaccacagcctacatggatgtgaggagcctgagatctgacgacacggccgtatattactgtgggagaggcggactttacggtttgaactactggggccaggga

SEQ ID NO: 2990 - protein, 43 aa, Artificial Sequence
  Description of Artificial Sequence: Synthetic antibody
ITMTTDTSTTTAYMDVRSLRSDDTAVYYCGRGGLYGLNYWGQG

SEQ ID NO: 2991 - DNA, 129 bp, Artificial Sequence
  Description of Artificial Sequence: Synthetic antibody
atcaccatgaccacacacacatccacgaccacagcctacatggatgtgaggagcctgagatctgacgacacggccgtatattactgtgggagaggcggactttacggtttgaactactggggccaggga

SEQ ID NO: 2992 - protein, 43 aa, Artificial Sequence
  Description of Artificial Sequence: Synthetic antibody
ITMTTHTSTTTAYMDVRSLRSDDTAVYYCGRGGLYGLNYWGQG

SEQ ID NO: 2993 - DNA, 129 bp, Artificial Sequence
  Description of Artificial Sequence: Synthetic antibody
atcaccatgaccacacacacacccacgaccacagcctacatggatgtgaggagcctgagatctgacgacacggccgtatattactgtgggagaggcggactttacggtttgaactactggggccaggga

SEQ ID NO: 2994 - protein, 43 aa, Artificial Sequence
  Description of Artificial Sequence: Synthetic antibody
ITMTTHTPTTTAYMDVRSLRSDDTAVYYCGRGGLYGLNYWGQG

SEQ ID NO: 2995 - DNA, 129 bp, Artificial Sequence
  Description of Artificial Sequence: Synthetic antibody
atcaccatgaccacacacacaaccacgaccacagcctacatggatgtgaggagcctgagatctgacgacacggccgtatattactgtgggagaggcggactttacggtttgaactactggggccaggga

SEQ ID NO: 2996 - protein, 43 aa, Artificial Sequence
  Description of Artificial Sequence: Synthetic antibody
ITMTTHTTTTTAYMDVRSLRSDDTAVYYCGRGGLYGLNYWGQG

SEQ ID NO: 2997 - DNA, 129 bp, Artificial Sequence
  Description of Artificial Sequence: Synthetic antibody
atcaccatcaccacagacacatccacgaccacagcctacatggatgtgaggagcctgagatctgacgacacggccgtatattactgtgggagaggcggactttacggtttgaactactggggccaggga

SEQ ID NO: 2998 - protein, 43 aa, Artificial Sequence
  Description of Artificial Sequence: Synthetic antibody
ITITTDTSTTTAYMDVRSLRSDDTAVYYCGRGGLYGLNYWGQG

SEQ ID NO: 2999 - DNA, 129 bp, Artificial Sequence
  Description of Artificial Sequence: Synthetic antibody
atcaccatcaccacacacacatccacgaccacagcctacatggatgtgaggagcctgagatctgacgacacggccgtatattactgtgggagaggcggactttacggtttgaactactggggccaggga

SEQ ID NO: 3000 - protein, 43 aa, Artificial Sequence
  Description of Artificial Sequence: Synthetic antibody
ITITTHTSTTTAYMDVRSLRSDDTAVYYCGRGGLYGLNYWGQG

SEQ ID NO: 3001 - DNA, 129 bp, Artificial Sequence
  Description of Artificial Sequence: Synthetic antibody
atcaccatcaccacacacacaaccacgaccacagcctacatggatgtgaggagcctgagatctgacgacacggccgtatattactgtgggagaggcggactttacggtttgaactactggggccaggga

SEQ ID NO: 3002 - protein, 43 aa, Artificial Sequence
  Description of Artificial Sequence: Synthetic antibody
ITITTHTTTTTAYMDVRSLRSDDTAVYYCGRGGLYGLNYWGQG

SEQ ID NO: 3003 - protein, 12 aa, Artificial Sequence
  Description of Artificial Sequence: Synthetic antibody
CAKNKGGLPGNW

SEQ ID NO: 3004 - DNA, 129 bp, Artificial Sequence
  Description of Artificial Sequence: Synthetic antibody
ttcaccatctccagatacaattccaagaacacgctgtatctgcaaatgaacagcctgagagccgaggacacggccgtatattactgtgcgaaaaacaaaggtggactcccaggcaactggggccaggga

SEQ ID NO: 3005 - protein, 43 aa, Artificial Sequence
  Description of Artificial Sequence: Synthetic antibody
FTISRYNSKNTLYLQMNSLRAEDTAVYYCAKNKGGLPGNWGQG

SEQ ID NO: 3006 - DNA, 129 bp, Artificial Sequence
  Description of Artificial Sequence: Synthetic antibody
ttcaccatctccagagacaattccaagaacacgctgtatctgcaaatgaacagcctgagagccgaggacacggccgtatattactgtgcgaaaaacaaaggtggactcccaggcaactggggccaggga

SEQ ID NO: 3007 - protein, 43 aa, Artificial Sequence
  Description of Artificial Sequence: Synthetic antibody
FTISRDNSKNTLYLQMNSLRAEDTAVYYCAKNKGGLPGNWGQG

SEQ ID NO: 3008 - DNA, 129 bp, Artificial Sequence
  Description of Artificial Sequence: Synthetic antibody
ttcaccatctccagagacaattccaagaacacgctgtatctgaaaatcaacagcctgagagccgaggacacggccgtatattactgtgcgaaaaacaaaggtggactcccaggcaactggggccaggga

SEQ ID NO: 3009 - protein, 43 aa, Artificial Sequence
  Description of Artificial Sequence: Synthetic antibody
FTISRDNSKNTLYLKINSLRAEDTAVYYCAKNKGGLPGNWGQG

SEQ ID NO: 3010 - DNA, 129 bp, Artificial Sequence
  Description of Artificial Sequence: Synthetic antibody
ttcaccatctccagacacaattccaagaacacgctgtatctgcaaatgaacagcctgagagccgaggacacggccgtatattactgtgcgaaaaacaaaggtggactcccaggcaactggggccaggga

SEQ ID NO: 3011 - protein, 43 aa, Artificial Sequence
  Description of Artificial Sequence: Synthetic antibody
FTISRHNSKNTLYLQMNSLRAEDTAVYYCAKNKGGLPGNWGQG

SEQ ID NO: 3012 - DNA, 129 bp, Artificial Sequence
  Description of Artificial Sequence: Synthetic antibody
ttcaccatctccagacacaattccaagaacacgctgtatctgcaaatcaacagcctgagagccgaggacacggccgtatattactgtgcgaaaaacaaaggtggactcccaggcaactggggccaggga

SEQ ID NO: 3013 - protein, 43 aa, Artificial Sequence
  Description of Artificial Sequence: Synthetic antibody
FTISRHNSKNTLYLQINSLRAEDTAVYYCAKNKGGLPGNWGQG

SEQ ID NO: 3014 - DNA, 129 bp, Artificial Sequence
  Description of Artificial Sequence: Synthetic antibody
ttcaccatctccagacacaataccaagaacacgctgtatctgcaaatgaacagcctgagagccgaggacacggccgtatattactgtgcgaaaaacaaaggtggactcccaggcaactggggccaggga

SEQ ID NO: 3015 - protein, 43 aa, Artificial Sequence
  Description of Artificial Sequence: Synthetic antibody
FTISRHNTKNTLYLQMNSLRAEDTAVYYCAKNKGGLPGNWGQG

SEQ ID NO: 3016 - DNA, 129 bp, Artificial Sequence
  Description of Artificial Sequence: Synthetic antibody
ttcaccatctccacacacaattccaagaacacgctgtatctgcaaatgaacagcctgagagccgaggacacggccgtatattactgtgcgaaaaacaaaggtggactcccaggcaactggggccaggga

SEQ ID NO: 3017 - protein, 43 aa, Artificial Sequence
  Description of Artificial Sequence: Synthetic antibody
FTISTHNSKNTLYLQMNSLRAEDTAVYYCAKNKGGLPGNWGQG

SEQ ID NO: 3018 - protein, 14 aa, Artificial Sequence
  Description of Artificial Sequence: Synthetic antibody
CASRGGDPYYFDYW

SEQ ID NO: 3019 - DNA, 129 bp, Artificial Sequence
  Description of Artificial Sequence: Synthetic antibody
ttctccagagataattccaacaacacgctgtatctgcaaatgaacagcctgagagccgaggacacggccgtatattactgtgcgagtaggggtggggacccctactactttgactactggggccaggga

SEQ ID NO: 3020 - protein, 43 aa, Artificial Sequence
  Description of Artificial Sequence: Synthetic antibody
FSRDNSNNTLYLQMNSLRAEDTAVYYCASRGGDPYYFDYWGQG

SEQ ID NO: 3021 - DNA, 129 bp, Artificial Sequence
  Description of Artificial Sequence: Synthetic antibody
atctccatatataattccaagaacacgctgtatctgcaaatgaacagcctgagagccgaggacacggccgtatattactgtgcgagtaggggtggggacccctactactttgactactggggccaggga

SEQ ID NO: 3022 - protein, 43 aa, Artificial Sequence
  Description of Artificial Sequence: Synthetic antibody
ISIYNSKNTLYLQMNSLRAEDTAVYYCASRGGDPYYFDYWGQG

SEQ ID NO: 3023 - DNA, 129 bp, Artificial Sequence
  Description of Artificial Sequence: Synthetic antibody
atctccatagataattccaagaacacgctgtatctgcaaatgaacagcctgagagccgaggacacggccgtatattactgtgcgagtaggggtggggacccctactactttgactactggggccaggga

SEQ ID NO: 3024 - protein, 43 aa, Artificial Sequence
  Description of Artificial Sequence: Synthetic antibody
ISIDNSKNTLYLQMNSLRAEDTAVYYCASRGGDPYYFDYWGQG

SEQ ID NO: 3025 - DNA, 129 bp, Artificial Sequence
  Description of Artificial Sequence: Synthetic antibody
atctccatacataattccaagaacacgctgtatctgcaaatgaacagcctgagagccgaggacacggccgtatattactgtgcgagtaggggtggggacccctactactttgactactggggccaggga

SEQ ID NO: 3026 - protein, 43 aa, Artificial Sequence
  Description of Artificial Sequence: Synthetic antibody
ISIHNSKNTLYLQMNSLRAEDTAVYYCASRGGDPYYFDYWGQG

SEQ ID NO: 3027 - DNA, 129 bp, Artificial Sequence
  Description of Artificial Sequence: Synthetic antibody
atctccagatataattccaagaacacgctgtatctgcaaatgaacagcctgagagccgaggacacggccgtatattactgtgcgagtaggggtggggacccctactactttgactactggggccaggga

SEQ ID NO: 3028 - protein, 43 aa, Artificial Sequence
  Description of Artificial Sequence: Synthetic antibody
ISRYNSKNTLYLQMNSLRAEDTAVYYCASRGGDPYYFDYWGQG

SEQ ID NO: 3029 - DNA, 129 bp, Artificial Sequence
  Description of Artificial Sequence: Synthetic antibody
atctccagatataattccaacaacacgctgtatctgcaaatgaacagcctgagagccgaggacacggccgtatattactgtgcgagtaggggtggggacccctactactttgactactggggccaggga

SEQ ID NO: 3030 - protein, 43 aa, Artificial Sequence
  Description of Artificial Sequence: Synthetic antibody
ISRYNSNNTLYLQMNSLRAEDTAVYYCASRGGDPYYFDYWGQG

SEQ ID NO: 3031 - DNA, 129 bp, Artificial Sequence
  Description of Artificial Sequence: Synthetic antibody
atctccagagataattccaagaacacgctgtatctgcaaatgaacagcctgagagccgaggacacggccgtatattactgtgcgagtaggggtggggacccctactactttgactactggggccaggga

SEQ ID NO: 3032 - protein, 43 aa, Artificial Sequence
  Description of Artificial Sequence: Synthetic antibody
ISRDNSKNTLYLQMNSLRAEDTAVYYCASRGGDPYYFDYWGQG

SEQ ID NO: 3033 - protein, 16 aa, Artificial Sequence
  Description of Artificial Sequence: Synthetic antibody
CARDIAAAGGVVRDYW

SEQ ID NO: 3034 - DNA, 129 bp, Artificial Sequence
  Description of Artificial Sequence: Synthetic antibody
tgggacacgtccacgagcactgtctacatggagctgagcagcctgagatctgaggacacggccgtgtattactgtgcgagggatatagcagcagctggtggggtggtgagggactactggggccaggga

SEQ ID NO: 3035 - protein, 43 aa, Artificial Sequence
  Description of Artificial Sequence: Synthetic antibody
WDTSTSTVYMELSSLRSEDTAVYYCARDIAAAGGVVRDYWGQG

SEQ ID NO: 3036 - DNA, 129 bp, Artificial Sequence
  Description of Artificial Sequence: Synthetic antibody
tgggacacgtccacgagcacagtctacatggagctgagcagcctgagatctgaggacacggccgtgtattactgtgcgagggatatagcagcagctggtggggtggtgagggactactggggccaggga

SEQ ID NO: 3037 - DNA, 129 bp, Artificial Sequence
  Description of Artificial Sequence: Synthetic antibody
tgggacacgtccacgagcacagtctacatggagctgagcagcctgagatctgaggacacggccgtgtattactgtgcgagggatatagcagcagctgggggggtggtgagggactactggggccaggga

SEQ ID NO: 3038 - DNA, 129 bp, Artificial Sequence
  Description of Artificial Sequence: Synthetic antibody
tgggacacgtccacgagcacagtctacatggagctgagcagcctgagagctgaggacacggccgtgtattactgtgcgagggatatagcagcagctggtggggtggtgagggactactggggccaggga

SEQ ID NO: 3039 - protein, 43 aa, Artificial Sequence
  Description of Artificial Sequence: Synthetic antibody
WDTSTSTVYMELSSLRAEDTAVYYCARDIAAAGGVVRDYWGQG

SEQ ID NO: 3040 - DNA, 129 bp, Artificial Sequence
  Description of Artificial Sequence: Synthetic antibody
tgggacacgcccacgagcacagtctacatggagctgagcagcctgagatctgaggacacggccgtgtattactgtgcgagggatatagcagcagctggtggggtggtgagggactactggggccaggga

SEQ ID NO: 3041 - protein, 43 aa, Artificial Sequence
  Description of Artificial Sequence: Synthetic antibody
WDTPTSTVYMELSSLRSEDTAVYYCARDIAAAGGVVRDYWGQG

SEQ ID NO: 3042 - DNA, 129 bp, Artificial Sequence
  Description of Artificial Sequence: Synthetic antibody
agggacacgtccacgagcacagtctacatggagctgagcagcctgagatctgaggacacggccgtgtattactgtgcgagggatatagcagcagctggtggggtggtgagggactactggggccaggga

SEQ ID NO: 3043 - protein, 43 aa, Artificial Sequence
  Description of Artificial Sequence: Synthetic antibody
RDTSTSTVYMELSSLRSEDTAVYYCARDIAAAGGVVRDYWGQG

SEQ ID NO: 3044 - protein, 14 aa, Artificial Sequence
  Description of Artificial Sequence: Synthetic antibody
CGGSYYYYYGMDVW

SEQ ID NO: 3045 - DNA, 129 bp, Artificial Sequence
  Description of Artificial Sequence: Synthetic antibody
ttctccagagataattccaacaacacgctgtatctgcaaatgaacagcctgagagccgaggacacggccgtatattactgtggggggtcatactactactactacggtatggacgtctggggccaaggg

SEQ ID NO: 3046 - protein, 43 aa, Artificial Sequence
  Description of Artificial Sequence: Synthetic antibody
FSRDNSNNTLYLQMNSLRAEDTAVYYCGGSYYYYYGMDVWGQG

SEQ ID NO: 3047 - DNA, 129 bp, Artificial Sequence
  Description of Artificial Sequence: Synthetic antibody
atctccatatataattccaagaacacgctgtatctgcaaatgaacagcctgagagccgaggacacggccgtatattactgtggggggtcatactactactactacggtatggacgtctggggccaaggg

SEQ ID NO: 3048 - protein, 43 aa, Artificial Sequence
  Description of Artificial Sequence: Synthetic antibody
ISIYNSKNTLYLQMNSLRAEDTAVYYCGGSYYYYYGMDVWGQG

SEQ ID NO: 3049 - DNA, 129 bp, Artificial Sequence
  Description of Artificial Sequence: Synthetic antibody
atctccatacataattccaagaacacgctgtatctgcaaatgaacagcctgagagccgaggacacggccgtatattactgtggggggtcatactactactactacggtatggacgtctggggccaaggg

SEQ ID NO: 3050 - protein, 43 aa, Artificial Sequence
  Description of Artificial Sequence: Synthetic antibody
ISIHNSKNTLYLQMNSLRAEDTAVYYCGGSYYYYYGMDVWGQG

SEQ ID NO: 3051 - DNA, 129 bp, Artificial Sequence
  Description of Artificial Sequence: Synthetic antibody
atctccagagataattccaagaacacgctgtatctgcaaatgaacagcctgagagccgaggacacggccgtatattactgtggggggtcatactactactactacggtatggacgtctggggccaaggg

SEQ ID NO: 3052 - protein, 43 aa, Artificial Sequence
  Description of Artificial Sequence: Synthetic antibody
ISRDNSKNTLYLQMNSLRAEDTAVYYCGGSYYYYYGMDVWGQG

SEQ ID NO: 3053 - DNA, 129 bp, Artificial Sequence
  Description of Artificial Sequence: Synthetic antibody
atctccagacataattccaagaacacgctgtatctgcaaatgaacagcctgagagccgaggacacggccgtatattactgtggggggtcatactactactactacggtatggacgtctggggccaaggg

SEQ ID NO: 3054 - protein, 43 aa, Artificial Sequence
  Description of Artificial Sequence: Synthetic antibody
ISRHNSKNTLYLQMNSLRAEDTAVYYCGGSYYYYYGMDVWGQG

SEQ ID NO: 3055 - DNA, 129 bp, Artificial Sequence
  Description of Artificial Sequence: Synthetic antibody
atctccagacataattccaacaacacgctgtatctgcaaatgaacagcctgagagccgaggacacggccgtatattactgtggggggtcatactactactactacggtatggacgtctggggccaaggg

SEQ ID NO: 3056 - protein, 43 aa, Artificial Sequence
  Description of Artificial Sequence: Synthetic antibody
ISRHNSNNTLYLQMNSLRAEDTAVYYCGGSYYYYYGMDVWGQG

SEQ ID NO: 3057 - protein, 23 aa, Artificial Sequence
  Description of Artificial Sequence: Synthetic antibody
CAKDIATDIVATEEDYAYALDVW

SEQ ID NO: 3058 - DNA, 129 bp, Artificial Sequence
  Description of Artificial Sequence: Synthetic antibody
ctttatttgcagatgcgcagtctgcgagctgaggacacggccctgtatttctgtgcaaaagatatcgccactgacatagtggcgacggaggaagactacgcctacgctctagacgtctggggccaaggg

SEQ ID NO: 3059 - protein, 43 aa, Artificial Sequence
  Description of Artificial Sequence: Synthetic antibody
LYLQMRSLRAEDTALYFCAKDIATDIVATEEDYAYALDVWGQG

SEQ ID NO: 3060 - DNA, 129 bp, Artificial Sequence
  Description of Artificial Sequence: Synthetic antibody
ctgtatttgctgatgagcaggctgcgagctgaggacacggccctgtatttctgtgcaaaagatatcgccactgacatagtggcgacggaggaagactacgcctacgctctagacgtctggggccaaggg

SEQ ID NO: 3061 - protein, 43 aa, Artificial Sequence
  Description of Artificial Sequence: Synthetic antibody
LYLLMSRLRAEDTALYFCAKDIATDIVATEEDYAYALDVWGQG

SEQ ID NO: 3062 - DNA, 129 bp, Artificial Sequence
  Description of Artificial Sequence: Synthetic antibody
ctgtatttgcagatgagcagtctgcgagctgaggacacggccctgtatttctgtgcaaaagatatcgccactgacatagtggcgacggaggaagactacgcctacgctctagacgtctggggccaaggg

SEQ ID NO: 3063 - protein, 43 aa, Artificial Sequence
  Description of Artificial Sequence: Synthetic antibody
LYLQMSSLRAEDTALYFCAKDIATDIVATEEDYAYALDVWGQG

SEQ ID NO: 3064 - DNA, 129 bp, Artificial Sequence
  Description of Artificial Sequence: Synthetic antibody
ctgtatttgcagatccgcagtctgcgagctgaggacacggccctgtatttctgtgcaaaagatatcgccactgacatagtggcgacggaggaagactacgcctacgctctagacgtctggggccaaggg

SEQ ID NO: 3065 - protein, 43 aa, Artificial Sequence
  Description of Artificial Sequence: Synthetic antibody
LYLQIRSLRAEDTALYFCAKDIATDIVATEEDYAYALDVWGQG

SEQ ID NO: 3066 - DNA, 129 bp, Artificial Sequence
  Description of Artificial Sequence: Synthetic antibody
atgtatttgctgatgagcagtctgcgagctgaggacacggccctgtatttctgtgcaaaagatatcgccactgacatagtggcgacggaggaagactacgcctacgctctagacgtctggggccaaggg

SEQ ID NO: 3067 - protein, 43 aa, Artificial Sequence
  Description of Artificial Sequence: Synthetic antibody
MYLLMSSLRAEDTALYFCAKDIATDIVATEEDYAYALDVWGQG

SEQ ID NO: 3068 - DNA, 129 bp, Artificial Sequence
  Description of Artificial Sequence: Synthetic antibody
atgtatttgcagatgtgcagtctgcgagctgaggacacggccctgtatttctgtgcaaaagatatcgccactgacatagtggcgacggaggaagactacgcctacgctctagacgtctggggccaaggg

SEQ ID NO: 3069 - protein, 43 aa, Artificial Sequence
  Description of Artificial Sequence: Synthetic antibody
MYLQMCSLRAEDTALYFCAKDIATDIVATEEDYAYALDVWGQG

SEQ ID NO: 3070 - protein, 14 aa, Artificial Sequence
  Description of Artificial Sequence: Synthetic antibody
CAKDLGSYGRFDYW

SEQ ID NO: 3071 - DNA, 129 bp, Artificial Sequence
  Description of Artificial Sequence: Synthetic antibody
ttctccagagacaattccaataatacgctgtatctgcaaatgaacagcctgagagccgaggacacggccgtatattactgtgcgaaagatcttggcagctatggccgctttgactactggggccaggga

SEQ ID NO: 3072 - protein, 43 aa, Artificial Sequence
  Description of Artificial Sequence: Synthetic antibody
FSRDNSNNTLYLQMNSLRAEDTAVYYCAKDLGSYGRFDYWGQG

SEQ ID NO: 3073 - DNA, 129 bp, Artificial Sequence
  Description of Artificial Sequence: Synthetic antibody
ttctccagacacaattccaagaatacgctgtatctgcaaatgaacagcctgagagccgaggacacggccgtatattactgtgcgaaagatcttggcagctatggccgctttgactactggggccaggga

SEQ ID NO: 3074 - protein, 43 aa, Artificial Sequence
  Description of Artificial Sequence: Synthetic antibody
FSRHNSKNTLYLQMNSLRAEDTAVYYCAKDLGSYGRFDYWGQG

SEQ ID NO: 3075 - DNA, 129 bp, Artificial Sequence
  Description of Artificial Sequence: Synthetic antibody
atctccatatacaattccaagaatacgctgtatctgcaaatgaacagcctgagagccgaggacacggccgtatattactgtgcgaaagatcttggcagctatggccgctttgactactggggccaggga

SEQ ID NO: 3076 - protein, 43 aa, Artificial Sequence
  Description of Artificial Sequence: Synthetic antibody
ISIYNSKNTLYLQMNSLRAEDTAVYYCAKDLGSYGRFDYWGQG

SEQ ID NO: 3077 - DNA, 129 bp, Artificial Sequence
  Description of Artificial Sequence: Synthetic antibody
atctccatacacaattccaagaatacgctgtatctgcaaatgaacagcctgagagccgaggacacggccgtatattactgtgcgaaagatcttggcagctatggccgctttgactactggggccaggga

SEQ ID NO: 3078 - protein, 43 aa, Artificial Sequence
  Description of Artificial Sequence: Synthetic antibody
ISIHNSKNTLYLQMNSLRAEDTAVYYCAKDLGSYGRFDYWGQG

SEQ ID NO: 3079 - DNA, 129 bp, Artificial Sequence
  Description of Artificial Sequence: Synthetic antibody
atctccagagacaattccaagaatacgctgtatctgcaaatgaacagcctgagagccgaggacacggccgtatattactgtgcgaaagatcttggcagctatggccgctttgactactggggccaggga

SEQ ID NO: 3080 - protein, 43 aa, Artificial Sequence
  Description of Artificial Sequence: Synthetic antibody
ISRDNSKNTLYLQMNSLRAEDTAVYYCAKDLGSYGRFDYWGQG

SEQ ID NO: 3081 - DNA, 129 bp, Artificial Sequence
  Description of Artificial Sequence: Synthetic antibody
atctccagagacaattccaagaacacgctgtatctgcaaatgaacagcctgagagccgaggacacggccgtatattactgtgcgaaagatcttggcagctatggccgctttgactactggggccaggga

SEQ ID NO: 3082 - protein, 21 aa, Artificial Sequence
  Description of Artificial Sequence: Synthetic antibody
CAKDHGESYPWYSRGGGMDVW

SEQ ID NO: 3083 - DNA, 129 bp, Artificial Sequence
  Description of Artificial Sequence: Synthetic antibody
aacacgctgtatctgcaaatgaacagcctgagagccgaggacacggccgtatattactgtgcgaaagatcatggcgaatcttatccttggtatagcaggggagggggtatggacgtctggggccaaggg

SEQ ID NO: 3084 - protein, 43 aa, Artificial Sequence
  Description of Artificial Sequence: Synthetic antibody
NTLYLQMNSLRAEDTAVYYCAKDHGESYPWYSRGGGMDVWGQG

SEQ ID NO: 3085 - DNA, 129 bp, Artificial Sequence
  Description of Artificial Sequence: Synthetic antibody
aacacgctgtatctgcaaatcaacagcctgagagccgaggacacggccgtatattactgtgcgaaagatcatggcgaatcttatccttggtatagcaggggagggggtatggacgtctggggccaaggg

SEQ ID NO: 3086 - protein, 43 aa, Artificial Sequence
  Description of Artificial Sequence: Synthetic antibody
NTLYLQINSLRAEDTAVYYCAKDHGESYPWYSRGGGMDVWGQG

SEQ ID NO: 3087 - DNA, 129 bp, Artificial Sequence
  Description of Artificial Sequence: Synthetic antibody
aacacgatgtatctgcaaatcaacagcctgagagccgaggacacggccgtatattactgtgcgaaagatcatggcgaatcttatccttggtatagcaggggagggggtatggacgtctggggccaaggg

SEQ ID NO: 3088 - protein, 43 aa, Artificial Sequence
  Description of Artificial Sequence: Synthetic antibody
NTMYLQINSLRAEDTAVYYCAKDHGESYPWYSRGGGMDVWGQG

SEQ ID NO: 3089 - DNA, 129 bp, Artificial Sequence
  Description of Artificial Sequence: Synthetic antibody
aacacgatgtatctccaaatgaacagcctgagagccgaggacacggccgtatattactgtgcgaaagatcatggcgaatcttatccttggtatagcaggggagggggtatggacgtctggggccaaggg

SEQ ID NO: 3090 - protein, 43 aa, Artificial Sequence
  Description of Artificial Sequence: Synthetic antibody
NTMYLQMNSLRAEDTAVYYCAKDHGESYPWYSRGGGMDVWGQG

SEQ ID NO: 3091 - protein, 12 aa, Artificial Sequence
  Description of Artificial Sequence: Synthetic antibody
CARGVDLEPDYW

SEQ ID NO: 3092 - DNA, 129 bp, Artificial Sequence
  Description of Artificial Sequence: Synthetic antibody
ttcacggtctacagacacgactcgaggaatatggtatttcttcagatgaacagactgagagccgaggacacggccgtgtatttctgtgcgaggggcgtcgacctagagcctgactactggggccaggga

SEQ ID NO: 3093 - protein, 43 aa, Artificial Sequence
  Description of Artificial Sequence: Synthetic antibody
FTVYRHDSRNMVFLQMNRLRAEDTAVYFCARGVDLEPDYWGQG

SEQ ID NO: 3094 - DNA, 129 bp, Artificial Sequence
  Description of Artificial Sequence: Synthetic antibody
ttcaccgtctaccgacacgactcgaggaatatggtatttcttcagatgaacagactgagagccgaggacacggccgtgtatttctgtgcgaggggcgtcgacctagagcctgactactggggccaggga

SEQ ID NO: 3095 - DNA, 129 bp, Artificial Sequence
  Description of Artificial Sequence: Synthetic antibody
ttcaccgtctacagccacgactcgaggaatatggtatttcttcagatgaacagactgagagccgaggacacggccgtgtatttctgtgcgaggggcgtcgacctagagcctgactactggggccaggga

SEQ ID NO: 3096 - protein, 43 aa, Artificial Sequence
  Description of Artificial Sequence: Synthetic antibody
FTVYSHDSRNMVFLQMNRLRAEDTAVYFCARGVDLEPDYWGQG

SEQ ID NO: 3097 - DNA, 129 bp, Artificial Sequence
  Description of Artificial Sequence: Synthetic antibody
ttcaccgtctacagagacgactcgaggaatatggtatttcttcagatgaacagactgagagccgaggacacggccgtgtatttctgtgcgaggggcgtcgacctagagcctgactactggggccaggga

SEQ ID NO: 3098 - protein, 43 aa, Artificial Sequence
  Description of Artificial Sequence: Synthetic antibody
FTVYRDDSRNMVFLQMNRLRAEDTAVYFCARGVDLEPDYWGQG

SEQ ID NO: 3099 - DNA, 129 bp, Artificial Sequence
  Description of Artificial Sequence: Synthetic antibody
ttcaccgtctacagacacgactcgaggaatatggtatttcttcagatgaacagactgagagccgaggacacggccgtgtatttctgtgcgaggggcgtcgacctagagcctgactactggggccaggga

SEQ ID NO: 3100 - DNA, 129 bp, Artificial Sequence
  Description of Artificial Sequence: Synthetic antibody
tccacggtctaccgacacgactcgagtaatatggtatttcttcagatgaacagactgagagccgaggacacggccgtgtatttctgtgcgaggggcgtcgacctagagcctgactactggggccaggga

SEQ ID NO: 3101 - protein, 43 aa, Artificial Sequence
  Description of Artificial Sequence: Synthetic antibody
STVYRHDSSNMVFLQMNRLRAEDTAVYFCARGVDLEPDYWGQG

SEQ ID NO: 3102 - protein, 13 aa, Artificial Sequence
  Description of Artificial Sequence: Synthetic antibody
CTRHRVQQPFDPW

SEQ ID NO: 3103 - DNA, 129 bp, Artificial Sequence
  Description of Artificial Sequence: Synthetic antibody
accatctccatatatgattcaaagaacacggcgtatctgcaaatgaacagcctgaaaaccgaggacacggccgtgtattactgtactagacatagggtgcagcagcctttcgacccctggggccaggga

SEQ ID NO: 3104 - protein, 43 aa, Artificial Sequence
  Description of Artificial Sequence: Synthetic antibody
TISIYDSKNTAYLQMNSLKTEDTAVYYCTRHRVQQPFDPWGQG

SEQ ID NO: 3105 - DNA, 129 bp, Artificial Sequence
  Description of Artificial Sequence: Synthetic antibody
accatctccatagattattcaaagaacacggcgtatctgcaaatgaacagcctgaaaaccgaggacacggccgtgtattactgtactagacatagggtgcagcagcctttcgacccctggggccaggga

SEQ ID NO: 3106 - protein, 43 aa, Artificial Sequence
  Description of Artificial Sequence: Synthetic antibody
TISIDYSKNTAYLQMNSLKTEDTAVYYCTRHRVQQPFDPWGQG

SEQ ID NO: 3107 - DNA, 129 bp, Artificial Sequence
  Description of Artificial Sequence: Synthetic antibody
accatctccatagatgattcaaacaacacggcgtatctgcaaatgaacagcctgaaaaccgaggacacggccgtgtattactgtactagacatagggtgcagcagcctttcgacccctggggccaggga

SEQ ID NO: 3108 - protein, 43 aa, Artificial Sequence
  Description of Artificial Sequence: Synthetic antibody
TISIDDSNNTAYLQMNSLKTEDTAVYYCTRHRVQQPFDPWGQG

SEQ ID NO: 3109 - DNA, 129 bp, Artificial Sequence
  Description of Artificial Sequence: Synthetic antibody
accatctccagagattattcaaagaacacggcgtatctgcaaatgaacagccttaaaaccgaggacacggccgtgtattactgtactagacatagggtgcagcagcctttcgacccctggggccaggga

SEQ ID NO: 3110 - protein, 43 aa, Artificial Sequence
  Description of Artificial Sequence: Synthetic antibody
TISRDYSKNTAYLQMNSLKTEDTAVYYCTRHRVQQPFDPWGQG

SEQ ID NO: 3111 - DNA, 129 bp, Artificial Sequence
  Description of Artificial Sequence: Synthetic antibody
accatctccagagatgattcaaagaacacggcgtatctgcaaatgaacagcctgaaaaccgaggacacggccgtgtattactgtactagacatagggtgcagcagcctttcgacccctggggccaggga

SEQ ID NO: 3112 - protein, 43 aa, Artificial Sequence
  Description of Artificial Sequence: Synthetic antibody
TISRDDSKNTAYLQMNSLKTEDTAVYYCTRHRVQQPFDPWGQG

SEQ ID NO: 3113 - DNA, 129 bp, Artificial Sequence
  Description of Artificial Sequence: Synthetic antibody
aacatctccatagatgattcaaagaacacggcgtatctgcaaatgaacagcctgaaaaccgaggacacggccgtgtattactgtactagacatagggtgcagcagcctttcgacccctggggccaggga

SEQ ID NO: 3114 - protein, 43 aa, Artificial Sequence
  Description of Artificial Sequence: Synthetic antibody
NISIDDSKNTAYLQMNSLKTEDTAVYYCTRHRVQQPFDPWGQG

SEQ ID NO: 3115 - protein, 14 aa, Artificial Sequence
  Description of Artificial Sequence: Synthetic antibody
CAKVGPGWYRVDYW

SEQ ID NO: 3116 - DNA, 129 bp, Artificial Sequence
  Description of Artificial Sequence: Synthetic antibody
ttctccagacataattccaagaacacgctgtatctgcaaatgaacagcctgagagccgaggacacggccgtatattactgtgcgaaagtgggcccaggctggtacagagttgactactggggccaggga

SEQ ID NO: 3117 - protein, 43 aa, Artificial Sequence
  Description of Artificial Sequence: Synthetic antibody
FSRHNSKNTLYLQMNSLRAEDTAVYYCAKVGPGWYRVDYWGQG

SEQ ID NO: 3118 - DNA, 129 bp, Artificial Sequence
  Description of Artificial Sequence: Synthetic antibody
atctccatatataattccaagaacacgctgtatctgcaaatgaacagcctgagagccgaggacacggccgtatattactgtgcgaaagtgggcccaggctggtacagagttgactactggggccaggga

SEQ ID NO: 3119 - protein, 43 aa, Artificial Sequence
  Description of Artificial Sequence: Synthetic antibody
ISIYNSKNTLYLQMNSLRAEDTAVYYCAKVGPGWYRVDYWGQG

SEQ ID NO: 3120 - DNA, 129 bp, Artificial Sequence
  Description of Artificial Sequence: Synthetic antibody
atctccatagataattccaagaacacgctgtatctgcaaatgaacagcctgagagccgaggacacggccgtatattactgtgcgaaagtgggcccaggctggtacagagttgactactggggccaggga

SEQ ID NO: 3121 - protein, 43 aa, Artificial Sequence
  Description of Artificial Sequence: Synthetic antibody
ISIDNSKNTLYLQMNSLRAEDTAVYYCAKVGPGWYRVDYWGQG

SEQ ID NO: 3122 - DNA, 129 bp, Artificial Sequence
  Description of Artificial Sequence: Synthetic antibody
atctccatacataattccaagaacacgctgtatctgcaaatgaacagcctgagagccgaggacacggccgtatattactgtgcgaaagtgggcccaggctggtacagagttgactactggggccaggga

SEQ ID NO: 3123 - protein, 43 aa, Artificial Sequence
  Description of Artificial Sequence: Synthetic antibody
ISIHNSKNTLYLQMNSLRAEDTAVYYCAKVGPGWYRVDYWGQG

SEQ ID NO: 3124 - DNA, 129 bp, Artificial Sequence
  Description of Artificial Sequence: Synthetic antibody
atctccagagataattccaagaacacgctgtatctgcaaatgaacagcctgagagccgaggacacggccgtatattactgtgcgaaagtgggcccaggctggtacagagttgactactggggccaggga

SEQ ID NO: 3125 - protein, 43 aa, Artificial Sequence
  Description of Artificial Sequence: Synthetic antibody
ISRDNSKNTLYLQMNSLRAEDTAVYYCAKVGPGWYRVDYWGQG

SEQ ID NO: 3126 - DNA, 129 bp, Artificial Sequence
  Description of Artificial Sequence: Synthetic antibody
atctccagacataattccaagaacacgctgtatctgcaaatgaacagcctgagagccgaggacacggccgtatattactgtgcgaaagtgggcccaggctggtacagagttgactactggggccaggga

SEQ ID NO: 3127 - protein, 43 aa, Artificial Sequence
  Description of Artificial Sequence: Synthetic antibody
ISRHNSKNTLYLQMNSLRAEDTAVYYCAKVGPGWYRVDYWGQG

SEQ ID NO: 3128 - protein, 12 aa, Artificial Sequence
  Description of Artificial Sequence: Synthetic antibody
CARDGFNSGSAW

SEQ ID NO: 3129 - DNA, 129 bp, Artificial Sequence
  Description of Artificial Sequence: Synthetic antibody
ttcaccgtctccagagacaacgccaagaacacgctgtatctccaaatgaacagtctgagagtcgaagacacggctgtgtattactgtgcaagagatggatttaattcggggagtgcctggggccaggga

SEQ ID NO: 3130 - protein, 43 aa, Artificial Sequence
  Description of Artificial Sequence: Synthetic antibody
FTVSRDNAKNTLYLQMNSLRVEDTAVYYCARDGFNSGSAWGQG

SEQ ID NO: 3131 - DNA, 129 bp, Artificial Sequence
  Description of Artificial Sequence: Synthetic antibody
ttcaccgtctccagagacaacgccaagaacacgctgtatctccaaatcaacagtctgagagtcgaagacacggctgtgtattactgtgcaagagatggatttaattcggggagtgcctggggccaggga

SEQ ID NO: 3132 - protein, 43 aa, Artificial Sequence
  Description of Artificial Sequence: Synthetic antibody
FTVSRDNAKNTLYLQINSLRVEDTAVYYCARDGFNSGSAWGQG

SEQ ID NO: 3133 - DNA, 129 bp, Artificial Sequence
  Description of Artificial Sequence: Synthetic antibody
ttcaccgtctccagagacaacgccaacaacacgctgtatctccaaatgaacagtctgagagtcgaagacacggctgtgtattactgtgcaagagatggatttaattcggggagtgcctggggccaggga

SEQ ID NO: 3134 - protein, 43 aa, Artificial Sequence
  Description of Artificial Sequence: Synthetic antibody
FTVSRDNANNTLYLQMNSLRVEDTAVYYCARDGFNSGSAWGQG

SEQ ID NO: 3135 - DNA, 129 bp, Artificial Sequence
  Description of Artificial Sequence: Synthetic antibody
ttcaccgtctccagacacaacgccaagaacacgctgtatctccaaatgaacagtctgagagtcgaagacacggctgtgtattactgtgcaagagatggatttaattcggggagtgcctggggccaggga

SEQ ID NO: 3136 - protein, 43 aa, Artificial Sequence
  Description of Artificial Sequence: Synthetic antibody
FTVSRHNAKNTLYLQMNSLRVEDTAVYYCARDGFNSGSAWGQG

SEQ ID NO: 3137 - DNA, 129 bp, Artificial Sequence
  Description of Artificial Sequence: Synthetic antibody
ttcaccgtctccagacacaacgccaagaacacgctgtatctccaaatgaacagtctgagagtcgaacacacggctgtgtattactgtgcaagagatggatttaattcggggagtgcctggggccaggga

SEQ ID NO: 3138 - protein, 43 aa, Artificial Sequence
  Description of Artificial Sequence: Synthetic antibody
FTVSRHNAKNTLYLQMNSLRVEHTAVYYCARDGFNSGSAWGQG

SEQ ID NO: 3139 - DNA, 129 bp, Artificial Sequence
  Description of Artificial Sequence: Synthetic antibody
ttcaccgtctccagacacaacgccaagaacacgctgtatctccaaatcaacagtctgagagtcgaagacacggctgtgtattactgtgcaagagatggatttaattcggggagtgcctggggccaggga

SEQ ID NO: 3140 - protein, 43 aa, Artificial Sequence
  Description of Artificial Sequence: Synthetic antibody
FTVSRHNAKNTLYLQINSLRVEDTAVYYCARDGFNSGSAWGQG

SEQ ID NO: 3141 - protein, 13 aa, Artificial Sequence
  Description of Artificial Sequence: Synthetic antibody
CAKSADEWENDYW

SEQ ID NO: 3142 - DNA, 129 bp, Artificial Sequence
  Description of Artificial Sequence: Synthetic antibody
accatctccatagacaattccaacaacacgctgtatctgcaaatgaacagcctgagagccgaggacacggccgtatattactgtgcgaaaagcgcagacgagtgggaaaatgactactggggccaggga

SEQ ID NO: 3143 - protein, 43 aa, Artificial Sequence
  Description of Artificial Sequence: Synthetic antibody
TISIDNSNNTLYLQMNSLRAEDTAVYYCAKSADEWENDYWGQG

SEQ ID NO: 3144 - DNA, 129 bp, Artificial Sequence
  Description of Artificial Sequence: Synthetic antibody
accatctccatacacaattccaacaacacgctgtatctgcaaatgaacagcctgagagccgaggacacggccgtatattactgtgcgaaaagcgcagacgagtgggaaaatgactactggggccaggga

SEQ ID NO: 3145 - protein, 43 aa, Artificial Sequence
  Description of Artificial Sequence: Synthetic antibody
TISIHNSNNTLYLQMNSLRAEDTAVYYCAKSADEWENDYWGQG

SEQ ID NO: 3146 - DNA, 129 bp, Artificial Sequence
  Description of Artificial Sequence: Synthetic antibody
accatctccagagacaattccaagaacacgctgtatctgcaaatgaacagcctgagagccgaggacacggccgtatattactgtgcgaaaagcgcagacgagtgggaaaatgactactggggccaggga

SEQ ID NO: 3147 - protein, 43 aa, Artificial Sequence
  Description of Artificial Sequence: Synthetic antibody
TISRDNSKNTLYLQMNSLRAEDTAVYYCAKSADEWENDYWGQG

SEQ ID NO: 3148 - DNA, 129 bp, Artificial Sequence
  Description of Artificial Sequence: Synthetic antibody
accatctccagagacaattccaagaacacgctgtatctgcaaatgaacagcctgagagccgaggacacggccgtatattactgtgcgaaaagcgcagacgaatgggaaaatgactactggggccaggga

SEQ ID NO: 3149 - DNA, 129 bp, Artificial Sequence
  Description of Artificial Sequence: Synthetic antibody
accatctccagacacaattccaagaacacgctgtatctgcaaatgaacagcctgagagccgaggacacggccgtatattactgtgcgaaaagcgcagacgagtgggaaaatgactactggggccaggga

SEQ ID NO: 3150 - protein, 43 aa, Artificial Sequence
  Description of Artificial Sequence: Synthetic antibody
TISRHNSKNTLYLQMNSLRAEDTAVYYCAKSADEWENDYWGQG

SEQ ID NO: 3151 - DNA, 129 bp, Artificial Sequence
  Description of Artificial Sequence: Synthetic antibody
aacatctccatagacaattccaagaacacgctgtatctgcaaatgaacagcctgagagccgaggacacggccgtatattactgtgcgaaaagcgcagacgagtgggaaaatgactactggggccaggga

SEQ ID NO: 3152 - protein, 43 aa, Artificial Sequence
  Description of Artificial Sequence: Synthetic antibody
NISIDNSKNTLYLQMNSLRAEDTAVYYCAKSADEWENDYWGQG

SEQ ID NO: 3153 - protein, 17 aa, Artificial Sequence
  Description of Artificial Sequence: Synthetic antibody
CAKDPVSTWGGDWFDPW

SEQ ID NO: 3154 - DNA, 129 bp, Artificial Sequence
  Description of Artificial Sequence: Synthetic antibody
gacaattccaagaacacgctgtatctgcaaatgaaccgcctgagagccgaggacacggccgtatattactgtgcgaaagatcctgtatctacttgggggggggactggttcgacccctggggccaggga

SEQ ID NO: 3155 - protein, 43 aa, Artificial Sequence
  Description of Artificial Sequence: Synthetic antibody
DNSKNTLYLQMNRLRAEDTAVYYCAKDPVSTWGGDWFDPWGQG

SEQ ID NO: 3156 - DNA, 129 bp, Artificial Sequence
  Description of Artificial Sequence: Synthetic antibody
gacaattccaagaacacgctgtatctgcaaatgaacagcctgagagccgaggacacggccgtatattactgtgcgaaagatcctgtatctacttgggggggggactggttcgacccctggggccaggga

SEQ ID NO: 3157 - protein, 43 aa, Artificial Sequence
  Description of Artificial Sequence: Synthetic antibody
DNSKNTLYLQMNSLRAEDTAVYYCAKDPVSTWGGDWFDPWGQG

SEQ ID NO: 3158 - DNA, 129 bp, Artificial Sequence
  Description of Artificial Sequence: Synthetic antibody
gacaattccaacaacacgctgtatctgcaaatgaacagcctgagagccgaggacacggccgtatattactgtgcgaaagatcctgtatctacttgggggggggactggttcgacccctggggccaggga

SEQ ID NO: 3159 - protein, 43 aa, Artificial Sequence
  Description of Artificial Sequence: Synthetic antibody
DNSNNTLYLQMNSLRAEDTAVYYCAKDPVSTWGGDWFDPWGQG

SEQ ID NO: 3160 - DNA, 129 bp, Artificial Sequence
  Description of Artificial Sequence: Synthetic antibody
gacaatcccaacaacacgctgtatctgcaaatgaacagcctgagagccgaggacacggccgtatattactgtgcgaaagatcctgtatctacttgggggggggactggttcgacccctggggccaggga

SEQ ID NO: 3161 - protein, 43 aa, Artificial Sequence
  Description of Artificial Sequence: Synthetic antibody
DNPNNTLYLQMNSLRAEDTAVYYCAKDPVSTWGGDWFDPWGQG

SEQ ID NO: 3162 - DNA, 129 bp, Artificial Sequence
  Description of Artificial Sequence: Synthetic antibody
cacaattccaagaacacgctgtatctgcaaatgaacagcctgagagccgaggacacggccgtatattactgtgcgaaagatcctgtatctacttgggggggggactggttcgacccctggggccaggga

SEQ ID NO: 3163 - protein, 43 aa, Artificial Sequence
  Description of Artificial Sequence: Synthetic antibody
HNSKNTLYLQMNSLRAEDTAVYYCAKDPVSTWGGDWFDPWGQG

SEQ ID NO: 3164 - DNA, 129 bp, Artificial Sequence
  Description of Artificial Sequence: Synthetic antibody
cacaattccaacaacacgctgtatctgcaaatgaacagcctgagagccgaggacacggccgtatattactgtgcgaaagatcctgtatctacttgggggggggactggttcgacccctggggccaggga

SEQ ID NO: 3165 - protein, 43 aa, Artificial Sequence
  Description of Artificial Sequence: Synthetic antibody
HNSNNTLYLQMNSLRAEDTAVYYCAKDPVSTWGGDWFDPWGQG

SEQ ID NO: 3166 - protein, 21 aa, Artificial Sequence
  Description of Artificial Sequence: Synthetic antibody
CAKDGAWTYYYDSSGSRGGYW

SEQ ID NO: 3167 - DNA, 129 bp, Artificial Sequence
  Description of Artificial Sequence: Synthetic antibody
tacacgatgtatctgcaaatgaacagcctgagagccgaggacacggccgtatattactgtgcgaaagatggggcgtggacgtattactatgatagtagtggttcccgggggggctactggggccaggga

SEQ ID NO: 3168 - protein, 43 aa, Artificial Sequence
  Description of Artificial Sequence: Synthetic antibody
YTMYLQMNSLRAEDTAVYYCAKDGAWTYYYDSSGSRGGYWGQG

SEQ ID NO: 3169 - DNA, 129 bp, Artificial Sequence
  Description of Artificial Sequence: Synthetic antibody
aacacgctgtatctgcaaatgaacagcctgagagccgaggacacggccgtatattactgtgcgaaagatggggcgtggacgtattactatgatagtagtggttcccgggggggctactggggccaggga

SEQ ID NO: 3170 - protein, 43 aa, Artificial Sequence
  Description of Artificial Sequence: Synthetic antibody
NTLYLQMNSLRAEDTAVYYCAKDGAWTYYYDSSGSRGGYWGQG

SEQ ID NO: 3171 - DNA, 129 bp, Artificial Sequence
  Description of Artificial Sequence: Synthetic antibody
aacacgatgtatctgcaaatcaacagcctgagagccgaggacacggccgtatattactgtgcgaaagatggggcgtggacgtattactatgatagtagtggttcccgggggggctactggggccaggga

SEQ ID NO: 3172 - protein, 43 aa, Artificial Sequence
  Description of Artificial Sequence: Synthetic antibody
NTMYLQINSLRAEDTAVYYCAKDGAWTYYYDSSGSRGGYWGQG

SEQ ID NO: 3173 - DNA, 129 bp, Artificial Sequence
  Description of Artificial Sequence: Synthetic antibody
tacacgctgtatctgcaaatgaacagcctgagagccgaggacacggccgtatattactgtgcgaaagatggggcgtggacgtattactatgatagtagtggttcccgggggggctactggggccaggga

SEQ ID NO: 3174 - protein, 43 aa, Artificial Sequence
  Description of Artificial Sequence: Synthetic antibody
YTLYLQMNSLRAEDTAVYYCAKDGAWTYYYDSSGSRGGYWGQG

SEQ ID NO: 3175 - DNA, 129 bp, Artificial Sequence
  Description of Artificial Sequence: Synthetic antibody
aacacgctgtatctgcaaatcaacagcctgagagccgaggacacggccgtatattactgtgcgaaagatggggcgtggacgtattactatgatagtagtggttcccgggggggctactggggccaggga

SEQ ID NO: 3176 - protein, 43 aa, Artificial Sequence
  Description of Artificial Sequence: Synthetic antibody
NTLYLQINSLRAEDTAVYYCAKDGAWTYYYDSSGSRGGYWGQG

SEQ ID NO: 3177 - DNA, 129 bp, Artificial Sequence
  Description of Artificial Sequence: Synthetic antibody
aacacgatgtatctgcaaatgaacagcctgagagccgaggacacggccgtatattactgtgcgaaagatggggcgtggacgtattactatgatagtagtggttcccgggggggctactggggccaggga

SEQ ID NO: 3178 - protein, 43 aa, Artificial Sequence
  Description of Artificial Sequence: Synthetic antibody
NTMYLQMNSLRAEDTAVYYCAKDGAWTYYYDSSGSRGGYWGQG

SEQ ID NO: 3179 - protein, 14 aa, Artificial Sequence
  Description of Artificial Sequence: Synthetic antibody
CAKGRGDNSWYDYW

SEQ ID NO: 3180 - DNA, 129 bp, Artificial Sequence
  Description of Artificial Sequence: Synthetic antibody
ttctccagagataattccaagagcacgctgtatctgcaaatgaacagcctgagagccgaagacacggccgtatattactgtgctaaaggaaggggggacaacagctggtacgactactggggccaggga

SEQ ID NO: 3181 - protein, 43 aa, Artificial Sequence
  Description of Artificial Sequence: Synthetic antibody
FSRDNSKSTLYLQMNSLRAEDTAVYYCAKGRGDNSWYDYWGQG

SEQ ID NO: 3182 - DNA, 129 bp, Artificial Sequence
  Description of Artificial Sequence: Synthetic antibody
atctccatatataattccaagagcacgctgtatctgcaaatgaacagcctgagagccgaagacacggccgtatattactgtgctaaaggaaggggggacaacagctggtacgactactggggccaggga

SEQ ID NO: 3183 - protein, 43 aa, Artificial Sequence
  Description of Artificial Sequence: Synthetic antibody
ISIYNSKSTLYLQMNSLRAEDTAVYYCAKGRGDNSWYDYWGQG

SEQ ID NO: 3184 - DNA, 129 bp, Artificial Sequence
  Description of Artificial Sequence: Synthetic antibody
atctccatagataattccaagagcacgctgtatctgcaaatgaacagcctgagagccgaagacacggccgtatattactgtgctaaaggaaggggggacaacagctggtacgactactggggccaggga

SEQ ID NO: 3185 - protein, 43 aa, Artificial Sequence
  Description of Artificial Sequence: Synthetic antibody
ISIDNSKSTLYLQMNSLRAEDTAVYYCAKGRGDNSWYDYWGQG

SEQ ID NO: 3186 - DNA, 129 bp, Artificial Sequence
  Description of Artificial Sequence: Synthetic antibody
atctccagatataattccaagagcacgctgtatctgcaaatgaacagcctgagagccgaagacacggccgtatattactgtgctaaaggaaggggggacaacagctggtacgactactggggccaggga

SEQ ID NO: 3187 - protein, 43 aa, Artificial Sequence
  Description of Artificial Sequence: Synthetic antibody
ISRYNSKSTLYLQMNSLRAEDTAVYYCAKGRGDNSWYDYWGQG

SEQ ID NO: 3188 - DNA, 129 bp, Artificial Sequence
  Description of Artificial Sequence: Synthetic antibody
atctccagagataattccaagagcacgctgtatctgcaaatgaacagcctgagagccgaagacacggccgtatattactgtgctaaaggaaggggggacaacagctggtacgactactggggccaggga

SEQ ID NO: 3189 - protein, 43 aa, Artificial Sequence
  Description of Artificial Sequence: Synthetic antibody
ISRDNSKSTLYLQMNSLRAEDTAVYYCAKGRGDNSWYDYWGQG

SEQ ID NO: 3190 - DNA, 129 bp, Artificial Sequence
  Description of Artificial Sequence: Synthetic antibody
atctccagacataattccaagagcacgctgtatctgcaaatgaacagcctgagagccgaagacacggccgtatattactgtgctaaaggaaggggggacaacagctggtacgactactggggccaggga

SEQ ID NO: 3191 - protein, 43 aa, Artificial Sequence
  Description of Artificial Sequence: Synthetic antibody
ISRHNSKSTLYLQMNSLRAEDTAVYYCAKGRGDNSWYDYWGQG

SEQ ID NO: 3192 - protein, 16 aa, Artificial Sequence
  Description of Artificial Sequence: Synthetic antibody
CAKEAAADGSYYFDYW

SEQ ID NO: 3193 - DNA, 129 bp, Artificial Sequence
  Description of Artificial Sequence: Synthetic antibody
agagacaattccaagaacacgctgtatctgcaaatgaaccgcctgagagccgagaacacggccgtatattactgtgcgaaagaagcagcagcagacggtagttactactttgactactggggccaggga

SEQ ID NO: 3194 - protein, 43 aa, Artificial Sequence
  Description of Artificial Sequence: Synthetic antibody
RDNSKNTLYLQMNRLRAENTAVYYCAKEAAADGSYYFDYWGQG

SEQ ID NO: 3195 - DNA, 129 bp, Artificial Sequence
  Description of Artificial Sequence: Synthetic antibody
agagacaattccaagaacacgctgtatctgcaaatgaacagcctgagagccgataacacggccgtatattactgtgcgaaagaagcagcagcagacggtagttactactttgactactggggccaggga

SEQ ID NO: 3196 - protein, 43 aa, Artificial Sequence
  Description of Artificial Sequence: Synthetic antibody
RDNSKNTLYLQMNSLRADNTAVYYCAKEAAADGSYYFDYWGQG

SEQ ID NO: 3197 - DNA, 129 bp, Artificial Sequence
  Description of Artificial Sequence: Synthetic antibody
agagacaattccaagaacacgctgtatctgcaaatgaacagcctgagagccgaggacacggccgtatattactgtgcgaaagaagcagcagcagacggtagttactactttgactactggggccaggga

SEQ ID NO: 3198 - protein, 43 aa, Artificial Sequence
  Description of Artificial Sequence: Synthetic antibody
RDNSKNTLYLQMNSLRAEDTAVYYCAKEAAADGSYYFDYWGQG

SEQ ID NO: 3199 - DNA, 129 bp, Artificial Sequence
  Description of Artificial Sequence: Synthetic antibody
agagacaattccaagaacacgctgtatctgcaaatgaacagcctgagagccgagaacacggccgtatattactgtgcgaaagaagcagcagcagacggtagttactactttgactactggggccaggga

SEQ ID NO: 3200 - protein, 43 aa, Artificial Sequence
  Description of Artificial Sequence: Synthetic antibody
RDNSKNTLYLQMNSLRAENTAVYYCAKEAAADGSYYFDYWGQG

SEQ ID NO: 3201 - DNA, 129 bp, Artificial Sequence
  Description of Artificial Sequence: Synthetic antibody
agagacaattccaagaacacgctgtatctgcaaatgaacagcctgagagccgacaacacggccgtatattactgtgcgaaagaagcagcagcagacggtagttactactttgactactggggccaggga

SEQ ID NO: 3202 - DNA, 129 bp, Artificial Sequence
  Description of Artificial Sequence: Synthetic antibody
agagacaattccaacaacacgctgtatctgcaaatgaacagcctgagagccgagaacacggccgtatattactgtgcgaaagaagcagcagcagacggtagttactactttgactactggggccaggga

SEQ ID NO: 3203 - protein, 43 aa, Artificial Sequence
  Description of Artificial Sequence: Synthetic antibody
RDNSNNTLYLQMNSLRAENTAVYYCAKEAAADGSYYFDYWGQG

SEQ ID NO: 3204 - protein, 17 aa, Artificial Sequence
  Description of Artificial Sequence: Synthetic antibody
CTSRAAAGPIYNWFDPW

SEQ ID NO: 3205 - DNA, 129 bp, Artificial Sequence
  Description of Artificial Sequence: Synthetic antibody
gttgattcaaagaacacggcgtatctgcaaatgaacagcctgaaaaccgaggacacggccgtgtattactgtactagccgcgcagcagctggacccatttacaactggttcgacccctggggccaggga

SEQ ID NO: 3206 - protein, 43 aa, Artificial Sequence
  Description of Artificial Sequence: Synthetic antibody
VDSKNTAYLQMNSLKTEDTAVYYCTSRAAAGPIYNWFDPWGQG

SEQ ID NO: 3207 - DNA, 129 bp, Artificial Sequence
  Description of Artificial Sequence: Synthetic antibody
tatgattcaaagaacacggcgtatctgcaaatgaacagcctgaaaaccgaggacacggccgtgtattactgtactagccgcgcagcagctggacccatttacaactggttcgacccctggggccaggga

SEQ ID NO: 3208 - protein, 43 aa, Artificial Sequence
  Description of Artificial Sequence: Synthetic antibody
YDSKNTAYLQMNSLKTEDTAVYYCTSRAAAGPIYNWFDPWGQG

SEQ ID NO: 3209 - DNA, 129 bp, Artificial Sequence
  Description of Artificial Sequence: Synthetic antibody
tttgattcaaagaacacggcgtatctgcaaatgaacagcctgaaaaccgaggacacggccgtgtattactgtactagccgcgcagcagctggacccatttacaactggttcgacccctggggccaggga

SEQ ID NO: 3210 - protein, 43 aa, Artificial Sequence
  Description of Artificial Sequence: Synthetic antibody
FDSKNTAYLQMNSLKTEDTAVYYCTSRAAAGPIYNWFDPWGQG

SEQ ID NO: 3211 - DNA, 129 bp, Artificial Sequence
  Description of Artificial Sequence: Synthetic antibody
gttgattcaaacaacacggcgtatctgcaaatgaacagcctgaaaaccgaggacacggccgtgtattactgtactagccgcgcagcagctggacccatttacaactggttcgacccctggggccaggga

SEQ ID NO: 3212 - protein, 43 aa, Artificial Sequence
  Description of Artificial Sequence: Synthetic antibody
VDSNNTAYLQMNSLKTEDTAVYYCTSRAAAGPIYNWFDPWGQG

SEQ ID NO: 3213 - DNA, 129 bp, Artificial Sequence
  Description of Artificial Sequence: Synthetic antibody
gatgattcaatcaacacggcgtatctgcaaatgaacagcctgaaaaccgaggacacggccgtgtattactgtactagccgcgcagcagctggacccatttacaactggttcgacccctggggccaggga

SEQ ID NO: 3214 - protein, 43 aa, Artificial Sequence
  Description of Artificial Sequence: Synthetic antibody
DDSINTAYLQMNSLKTEDTAVYYCTSRAAAGPIYNWFDPWGQG

SEQ ID NO: 3215 - DNA, 129 bp, Artificial Sequence
  Description of Artificial Sequence: Synthetic antibody
gatgattcaaagaacacggcgtatctgcaaatgaacagcctgaaaaccgaggacacggccgtgtattactgtactagccgcgcagcagctggacccatttacaactggttcgacccctggggccaggga

SEQ ID NO: 3216 - protein, 43 aa, Artificial Sequence
  Description of Artificial Sequence: Synthetic antibody
DDSKNTAYLQMNSLKTEDTAVYYCTSRAAAGPIYNWFDPWGQG

SEQ ID NO: 3217 - protein, 14 aa, Artificial Sequence
  Description of Artificial Sequence: Synthetic antibody
CACGHTYGYHIDYW

SEQ ID NO: 3218 - DNA, 129 bp, Artificial Sequence
  Description of Artificial Sequence: Synthetic antibody
ttctccagagacaattccaagaacacgctgtatctgcaaatgaacagcctgagagtcggagacacggccgtatattactgtgcctgtggacacacctatggttaccacattgactactggggcctggga

SEQ ID NO: 3219 - protein, 43 aa, Artificial Sequence
  Description of Artificial Sequence: Synthetic antibody
FSRDNSKNTLYLQMNSLRVGDTAVYYCACGHTYGYHIDYWGLG

SEQ ID NO: 3220 - DNA, 129 bp, Artificial Sequence
  Description of Artificial Sequence: Synthetic antibody
atctccatagacaattccaagaacacgctgtatctgcaaatgaacagcctgagagtcggagacacggccgtatattactgtgcctgtggacacacctatggttaccacattgactactggggcctggga

SEQ ID NO: 3221 - protein, 43 aa, Artificial Sequence
  Description of Artificial Sequence: Synthetic antibody
ISIDNSKNTLYLQMNSLRVGDTAVYYCACGHTYGYHIDYWGLG

SEQ ID NO: 3222 - DNA, 129 bp, Artificial Sequence
  Description of Artificial Sequence: Synthetic antibody
atctccagagacaattccaagaacacgctgtatctgcaaatgaacagcctgagagtcggagacacggccgtatattactgtgcctgtggacacacctatggttaccacattgactactggggcctggga

SEQ ID NO: 3223 - protein, 43 aa, Artificial Sequence
  Description of Artificial Sequence: Synthetic antibody
ISRDNSKNTLYLQMNSLRVGDTAVYYCACGHTYGYHIDYWGLG

SEQ ID NO: 3224 - DNA, 129 bp, Artificial Sequence
  Description of Artificial Sequence: Synthetic antibody
atctccagagacaattccaacaacacgctgtatctgcaaatgaacagcctgagagtcggagacacggccgtatattactgtgcctgtggacacacctatggttaccacattgactactggggcctggga

SEQ ID NO: 3225 - protein, 43 aa, Artificial Sequence
  Description of Artificial Sequence: Synthetic antibody
ISRDNSNNTLYLQMNSLRVGDTAVYYCACGHTYGYHIDYWGLG

SEQ ID NO: 3226 - DNA, 129 bp, Artificial Sequence
  Description of Artificial Sequence: Synthetic antibody
atctccagacacaattccaagaacacgctgtatctgcaaatgaacagcctgagagtcggagacacggccgtatattactgtgcctgtggacacacctatggttaccacattgactactggggcctggga

SEQ ID NO: 3227 - protein, 43 aa, Artificial Sequence
  Description of Artificial Sequence: Synthetic antibody
ISRHNSKNTLYLQMNSLRVGDTAVYYCACGHTYGYHIDYWGLG

SEQ ID NO: 3228 - DNA, 129 bp, Artificial Sequence
  Description of Artificial Sequence: Synthetic antibody
atctccagacacaattccaacaacacgctgtatctgcaaatgaacagcctgagagtcggagacacggccgtatattactgtgcctgtggacacacctatggttaccacattgactactggggcctggga

SEQ ID NO: 3229 - protein, 43 aa, Artificial Sequence
  Description of Artificial Sequence: Synthetic antibody
ISRHNSNNTLYLQMNSLRVGDTAVYYCACGHTYGYHIDYWGLG

SEQ ID NO: 3230 - protein, 17 aa, Artificial Sequence
  Description of Artificial Sequence: Synthetic antibody
CARGGGWGMTTLPPDYW

SEQ ID NO: 3231 - DNA, 129 bp, Artificial Sequence
  Description of Artificial Sequence: Synthetic antibody
gacacgtctaagaaccagttctccctgaagctgagctctgtgactgccgcggacacggccgtgtattactgtgcgagaggggggggttggggcatgactactttaccccccgactactggggccaggga

SEQ ID NO: 3232 - protein, 43 aa, Artificial Sequence
  Description of Artificial Sequence: Synthetic antibody
DTSKNQFSLKLSSVTAADTAVYYCARGGGWGMTTLPPDYWGQG

SEQ ID NO: 3233 - DNA, 129 bp, Artificial Sequence
  Description of Artificial Sequence: Synthetic antibody
gacacgtctaagaaccagttctccctgaagctgagctctgtgactgccgcggacacggccgtgtattactgtgcgagagggggggggtggggcatgactactttaccccccgactactggggccaggga

SEQ ID NO: 3234 - DNA, 129 bp, Artificial Sequence
  Description of Artificial Sequence: Synthetic antibody
gacacgtctaagaaccagttctccctgaagctgagctctgtgactgccgcggacacggccgtgtattactgtgcgagaggggggggatggggcatgactactttaccccccgactactggggccaggga

SEQ ID NO: 3235 - DNA, 129 bp, Artificial Sequence
  Description of Artificial Sequence: Synthetic antibody
gacacgtctaacaaccagttctccctgaagctgagctctgtgactgccgcggacacggccgtgtattactgtgcgagaggggggggttggggcatgactactttaccccccgactactggggccaggga

SEQ ID NO: 3236 - protein, 43 aa, Artificial Sequence
  Description of Artificial Sequence: Synthetic antibody
DTSNNQFSLKLSSVTAADTAVYYCARGGGWGMTTLPPDYWGQG

SEQ ID NO: 3237 - DNA, 129 bp, Artificial Sequence
  Description of Artificial Sequence: Synthetic antibody
gacacgtctaacaaccagttctccctgaagctgagctctgtgactgccgcggacacggccgtgtattactgtgcgagagggggggggtggggcatgactactttaccccccgactactggggccaggga

SEQ ID NO: 3238 - protein, 15 aa, Artificial Sequence
  Description of Artificial Sequence: Synthetic antibody
CAKNANNIVDYLDVW

SEQ ID NO: 3239 - DNA, 129 bp, Artificial Sequence
  Description of Artificial Sequence: Synthetic antibody
tccagagacaactccaagaacacattgtttctgcatttgaatggcctgcgggccggagacacggccgtatatttttgtgcgaaaaacgccaacaacatcgtcgactatttggacgtctggggccgaggg

SEQ ID NO: 3240 - protein, 43 aa, Artificial Sequence
  Description of Artificial Sequence: Synthetic antibody
SRDNSKNTLFLHLNGLRAGDTAVYFCAKNANNIVDYLDVWGRG

SEQ ID NO: 3241 - DNA, 129 bp, Artificial Sequence
  Description of Artificial Sequence: Synthetic antibody
tccagacacaactccaacaacacattgtttctgcatttgaatggcctgcgggccggagacacggccgtatatttttgtgcgaaaaacgccaacaacatcgtcgactatttggacgtctggggccgaggg

SEQ ID NO: 3242 - protein, 43 aa, Artificial Sequence
  Description of Artificial Sequence: Synthetic antibody
SRHNSNNTLFLHLNGLRAGDTAVYFCAKNANNIVDYLDVWGRG

SEQ ID NO: 3243 - DNA, 129 bp, Artificial Sequence
  Description of Artificial Sequence: Synthetic antibody
tccacagacaactccaagaacacattgtttctgcatttgaatggcctgcgggccggagacacggccgtatatttttgtgcgaaaaacgccaacaacatcgtcgactatttggacgtctggggccgaggg

SEQ ID NO: 3244 - protein, 43 aa, Artificial Sequence
  Description of Artificial Sequence: Synthetic antibody
STDNSKNTLFLHLNGLRAGDTAVYFCAKNANNIVDYLDVWGRG

SEQ ID NO: 3245 - DNA, 129 bp, Artificial Sequence
  Description of Artificial Sequence: Synthetic antibody
tccacagacaactccaacaacacattgtttctgcatttgaatggcctgcgggccggagacacggccgtatatttttgtgcgaaaaacgccaacaacatcgtcgactatttggacgtctggggccgaggg

SEQ ID NO: 3246 - protein, 43 aa, Artificial Sequence
  Description of Artificial Sequence: Synthetic antibody
STDNSNNTLFLHLNGLRAGDTAVYFCAKNANNIVDYLDVWGRG

SEQ ID NO: 3247 - DNA, 129 bp, Artificial Sequence
  Description of Artificial Sequence: Synthetic antibody
tccacacacaactccaagaacacattgtttctgcatttgaatggcctgcgggccggagacacggccgtatatttttgtgcgaaaaacgccaacaacatcgtcgactatttggacgtctggggccgaggg

SEQ ID NO: 3248 - protein, 43 aa, Artificial Sequence
  Description of Artificial Sequence: Synthetic antibody
STHNSKNTLFLHLNGLRAGDTAVYFCAKNANNIVDYLDVWGRG

SEQ ID NO: 3249 - DNA, 129 bp, Artificial Sequence
  Description of Artificial Sequence: Synthetic antibody
accacacacaactccaacaacacattgtttctgcatttgaatggccggcgggccggagacacggccgtatatttttgtgcgaaaaacgccaacaacatcgtcgactatttggacgtctggggccgaggg

SEQ ID NO: 3250 - protein, 43 aa, Artificial Sequence
  Description of Artificial Sequence: Synthetic antibody
TTHNSNNTLFLHLNGRRAGDTAVYFCAKNANNIVDYLDVWGRG

SEQ ID NO: 3251 - protein, 14 aa, Artificial Sequence
  Description of Artificial Sequence: Synthetic antibody
CAKGKRGLGHLDYW

SEQ ID NO: 3252 - DNA, 129 bp, Artificial Sequence
  Description of Artificial Sequence: Synthetic antibody
atctccatatataattccaagaacacgctgtatctgcaaatgaacagcctgagagccgaggacacggccgtatattactgtgcgaaaggaaagagggggctgggacaccttgactactggggccaggga

SEQ ID NO: 3253 - protein, 43 aa, Artificial Sequence
  Description of Artificial Sequence: Synthetic antibody
ISIYNSKNTLYLQMNSLRAEDTAVYYCAKGKRGLGHLDYWGQG

SEQ ID NO: 3254 - DNA, 129 bp, Artificial Sequence
  Description of Artificial Sequence: Synthetic antibody
atctccatagataattccaagaacacgctgtatctgcaaatgaacagcctgagagccgaggacacggccgtatattactgtgcgaaaggaaagagggggctgggacaccttgactactggggccaggga

SEQ ID NO: 3255 - protein, 43 aa, Artificial Sequence
  Description of Artificial Sequence: Synthetic antibody
ISIDNSKNTLYLQMNSLRAEDTAVYYCAKGKRGLGHLDYWGQG

SEQ ID NO: 3256 - DNA, 129 bp, Artificial Sequence
  Description of Artificial Sequence: Synthetic antibody
atctccatacataattccaagaacacgctgtatctgcaaatgaacagcctgagagccgaggacacggccgtatattactgtgcgaaaggaaagagggggctgggacaccttgactactggggccaggga

SEQ ID NO: 3257 - protein, 43 aa, Artificial Sequence
  Description of Artificial Sequence: Synthetic antibody
ISIHNSKNTLYLQMNSLRAEDTAVYYCAKGKRGLGHLDYWGQG

SEQ ID NO: 3258 - DNA, 129 bp, Artificial Sequence
  Description of Artificial Sequence: Synthetic antibody
atctccagatataattccaagaacacgctgtgtctgcaaatgaacagcctgagagccgaggacacggccgtatattactgtgcgaaaggaaagagggggctgggacaccttgactactggggccaggga

SEQ ID NO: 3259 - protein, 43 aa, Artificial Sequence
  Description of Artificial Sequence: Synthetic antibody
ISRYNSKNTLCLQMNSLRAEDTAVYYCAKGKRGLGHLDYWGQG

SEQ ID NO: 3260 - DNA, 129 bp, Artificial Sequence
  Description of Artificial Sequence: Synthetic antibody
atctccagagataattccaagaacacgctgtgtctgcaaatgaacagcctgagagccgaggacacggccgtatattactgtgcgaaaggaaagagggggctgggacaccttgactactggggccaggga

SEQ ID NO: 3261 - protein, 43 aa, Artificial Sequence
  Description of Artificial Sequence: Synthetic antibody
ISRDNSKNTLCLQMNSLRAEDTAVYYCAKGKRGLGHLDYWGQG

SEQ ID NO: 3262 - DNA, 129 bp, Artificial Sequence
  Description of Artificial Sequence: Synthetic antibody
atctccagagataattccaagaacacgctgtatctgcaaatgaacagcctgagagccgaggacacggccgtatattactgtgcgaaaggaaagagggggctgggacaccttgactactggggccaggga

SEQ ID NO: 3263 - protein, 43 aa, Artificial Sequence
  Description of Artificial Sequence: Synthetic antibody
ISRDNSKNTLYLQMNSLRAEDTAVYYCAKGKRGLGHLDYWGQG

SEQ ID NO: 3264 - protein, 13 aa, Artificial Sequence
  Description of Artificial Sequence: Synthetic antibody
CAKDPPAYGMDVW

SEQ ID NO: 3265 - DNA, 129 bp, Artificial Sequence
  Description of Artificial Sequence: Synthetic antibody
accttctccagagataattccaagagcacgctgtatctgcaaatgaacagcctgagagccgaggacacggccgtatattactgtgcgaaagatcccccggcctatggtatggacgtctggggccgaggg

SEQ ID NO: 3266 - protein, 43 aa, Artificial Sequence
  Description of Artificial Sequence: Synthetic antibody
TFSRDNSKSTLYLQMNSLRAEDTAVYYCAKDPPAYGMDVWGRG

SEQ ID NO: 3267 - DNA, 129 bp, Artificial Sequence
  Description of Artificial Sequence: Synthetic antibody
accatctccatatataattccaagaacacgctgtatctgcaaatgaacagcctgagagccgaggacacggccgtatattactgtgcgaaagatcccccggcctacggtatggacgtctggggccaaggg

SEQ ID NO: 3268 - protein, 43 aa, Artificial Sequence
  Description of Artificial Sequence: Synthetic antibody
TISIYNSKNTLYLQMNSLRAEDTAVYYCAKDPPAYGMDVWGQG

SEQ ID NO: 3269 - DNA, 129 bp, Artificial Sequence
  Description of Artificial Sequence: Synthetic antibody
accatctccatacataattccaagaacacgctgtatctgcaaatgaacagcctgagagccgaggacacggccgtatattactgtgcgaaagatcccccggcctacggtatggacgtctggggccaaggg

SEQ ID NO: 3270 - protein, 43 aa, Artificial Sequence
  Description of Artificial Sequence: Synthetic antibody
TISIHNSKNTLYLQMNSLRAEDTAVYYCAKDPPAYGMDVWGQG

SEQ ID NO: 3271 - DNA, 129 bp, Artificial Sequence
  Description of Artificial Sequence: Synthetic antibody
accatctccagagataattccaagaacacgctgtatctgcaaatgaacagcctgagagccgaggacacggccgtatattactgtgcgaaagatcccccggcctacggtatggacgtctggggccaaggg

SEQ ID NO: 3272 - protein, 43 aa, Artificial Sequence
  Description of Artificial Sequence: Synthetic antibody
TISRDNSKNTLYLQMNSLRAEDTAVYYCAKDPPAYGMDVWGQG

SEQ ID NO: 3273 - DNA, 129 bp, Artificial Sequence
  Description of Artificial Sequence: Synthetic antibody
accatctccagacataattccaagaacacgctgtatctgcaaatgaacagcctgagagccgaggacacggccgtatattactgtgcgaaagatcccccggcctacggtatggacgtctggggccaaggg

SEQ ID NO: 3274 - protein, 43 aa, Artificial Sequence
  Description of Artificial Sequence: Synthetic antibody
TISRHNSKNTLYLQMNSLRAEDTAVYYCAKDPPAYGMDVWGQG

SEQ ID NO: 3275 - DNA, 129 bp, Artificial Sequence
  Description of Artificial Sequence: Synthetic antibody
aacatctccatatataattccaagaacacgctgtatctgcaaatgaacagcctgagagccgaggacacggccgtatattactgtgcgaaagatcccccggcctacggtatggacgtctggggccaaggg

SEQ ID NO: 3276 - protein, 43 aa, Artificial Sequence
  Description of Artificial Sequence: Synthetic antibody
NISIYNSKNTLYLQMNSLRAEDTAVYYCAKDPPAYGMDVWGQG

SEQ ID NO: 3277 - protein, 13 aa, Artificial Sequence
  Description of Artificial Sequence: Synthetic antibody
CARAYRPYYFDYW

SEQ ID NO: 3278 - DNA, 129 bp, Artificial Sequence
  Description of Artificial Sequence: Synthetic antibody
tccatctccatacacaactccaagaacacgctgtatcttcaaatgaatagcctgagagccgaggacacggccgtgtattactgtgcgagagcatatcgaccgtattactttgactactggggccaggga

SEQ ID NO: 3279 - protein, 43 aa, Artificial Sequence
  Description of Artificial Sequence: Synthetic antibody
SISIHNSKNTLYLQMNSLRAEDTAVYYCARAYRPYYFDYWGQG

SEQ ID NO: 3280 - DNA, 129 bp, Artificial Sequence
  Description of Artificial Sequence: Synthetic antibody
accatctccatacacaactccaagaacacgctgtatcttcaaatgaatagcctgagagccgaggacacggccgtgtattactgtgcgagagcatatcgaccgtattactttgactactggggccaggga

SEQ ID NO: 3281 - protein, 43 aa, Artificial Sequence
  Description of Artificial Sequence: Synthetic antibody
TISIHNSKNTLYLQMNSLRAEDTAVYYCARAYRPYYFDYWGQG

SEQ ID NO: 3282 - DNA, 129 bp, Artificial Sequence
  Description of Artificial Sequence: Synthetic antibody
accatctccagagacaactccaagaacacgctgtatcttcaaatgaatagcctgagagccgaggacacggccgtgtattactgtgcgagagcatatcgaccgtattactttgactactggggccaggga

SEQ ID NO: 3283 - protein, 43 aa, Artificial Sequence
  Description of Artificial Sequence: Synthetic antibody
TISRDNSKNTLYLQMNSLRAEDTAVYYCARAYRPYYFDYWGQG

SEQ ID NO: 3284 - DNA, 129 bp, Artificial Sequence
  Description of Artificial Sequence: Synthetic antibody
accatctccagacacaactccaagaacacgctgtatcttcaaatgaatagcctgagagccgaggacacggccgtgtattactgtgcgagagcatatcgaccgtattactttgactactggggccaggga

SEQ ID NO: 3285 - protein, 43 aa, Artificial Sequence
  Description of Artificial Sequence: Synthetic antibody
TISRHNSKNTLYLQMNSLRAEDTAVYYCARAYRPYYFDYWGQG

SEQ ID NO: 3286 - DNA, 129 bp, Artificial Sequence
  Description of Artificial Sequence: Synthetic antibody
accatctccacacacaactccaagaacacgctgtatcttcaaatgaatagcctgagagccgaggacacggccgtgtattactgtgcgagagcatatcgaccgtattactttgactactggggccaggga

SEQ ID NO: 3287 - protein, 43 aa, Artificial Sequence
  Description of Artificial Sequence: Synthetic antibody
TISTHNSKNTLYLQMNSLRAEDTAVYYCARAYRPYYFDYWGQG

SEQ ID NO: 3288 - protein, 14 aa, Artificial Sequence
  Description of Artificial Sequence: Synthetic antibody
CAKDLAYGHAFDYW

SEQ ID NO: 3289 - DNA, 129 bp, Artificial Sequence
  Description of Artificial Sequence: Synthetic antibody
ttctccagagacaattccaacaacacgctgtatctgcaaatgaacagcctgagagccgaggacacggccgtatattactgtgcgaaagatctggcctatggccacgcctttgactactggggccaggga

SEQ ID NO: 3290 - protein, 43 aa, Artificial Sequence
  Description of Artificial Sequence: Synthetic antibody
FSRDNSNNTLYLQMNSLRAEDTAVYYCAKDLAYGHAFDYWGQG

SEQ ID NO: 3291 - DNA, 129 bp, Artificial Sequence
  Description of Artificial Sequence: Synthetic antibody
ttctccagacacaattccaagaacacgctgtatctgcaaatgaacagcctgagagccgaggacacggccgtatattactgtgcgaaagatctggcctatggccacgcctttgactactggggccaggga

SEQ ID NO: 3292 - protein, 43 aa, Artificial Sequence
  Description of Artificial Sequence: Synthetic antibody
FSRHNSKNTLYLQMNSLRAEDTAVYYCAKDLAYGHAFDYWGQG

SEQ ID NO: 3293 - DNA, 129 bp, Artificial Sequence
  Description of Artificial Sequence: Synthetic antibody
atctccatacacaattccaagaacacgctgtatctgcaaatgaacagcctgagagccgaggacacggccgtatattactgtgcgaaagatctggcctatggccacgcctttgactactggggccaggga

SEQ ID NO: 3294 - protein, 43 aa, Artificial Sequence
  Description of Artificial Sequence: Synthetic antibody
ISIHNSKNTLYLQMNSLRAEDTAVYYCAKDLAYGHAFDYWGQG

SEQ ID NO: 3295 - DNA, 129 bp, Artificial Sequence
  Description of Artificial Sequence: Synthetic antibody
atctccagagacaattccaagaacacgctgtatctgcaaatgaacagcctgagagccgaggacacggccgtatattactgtgcgaaagatctggcctatggccacgcctttgactactggggccaggga

SEQ ID NO: 3296 - protein, 43 aa, Artificial Sequence
  Description of Artificial Sequence: Synthetic antibody
ISRDNSKNTLYLQMNSLRAEDTAVYYCAKDLAYGHAFDYWGQG

SEQ ID NO: 3297 - DNA, 129 bp, Artificial Sequence
  Description of Artificial Sequence: Synthetic antibody
atctccagacacaattccaacaacacgctgtatctgcaaatgaacagcctgagagccgaggacacggccgtatattactgtgcgaaagatctggcctatggccacgcctttgactactggggccaggga

SEQ ID NO: 3298 - protein, 43 aa, Artificial Sequence
  Description of Artificial Sequence: Synthetic antibody
ISRHNSNNTLYLQMNSLRAEDTAVYYCAKDLAYGHAFDYWGQG

SEQ ID NO: 3299 - protein, 15 aa, Artificial Sequence
  Description of Artificial Sequence: Synthetic antibody
CANTRLVAATPRGTW

SEQ ID NO: 3300 - DNA, 129 bp, Artificial Sequence
  Description of Artificial Sequence: Synthetic antibody
tccagagacaattccaagaacacgctgtatctgcaaatgaacagcctgagagccgaggacacggccgtatattactgtgcgaacacacgtctggtagctgctactcccagaggtacctggggccaggga

SEQ ID NO: 3301 - protein, 43 aa, Artificial Sequence
  Description of Artificial Sequence: Synthetic antibody
SRDNSKNTLYLQMNSLRAEDTAVYYCANTRLVAATPRGTWGQG

SEQ ID NO: 3302 - DNA, 129 bp, Artificial Sequence
  Description of Artificial Sequence: Synthetic antibody
tccagacacaattccaacaacacgctgtatctgcaaatgaacagcctgagagccgaggacacggccgtatattactgtgcgaacacacgtctggtagctgctactcccagaggtacctggggccaggga

SEQ ID NO: 3303 - protein, 43 aa, Artificial Sequence
  Description of Artificial Sequence: Synthetic antibody
SRHNSNNTLYLQMNSLRAEDTAVYYCANTRLVAATPRGTWGQG

SEQ ID NO: 3304 - DNA, 129 bp, Artificial Sequence
  Description of Artificial Sequence: Synthetic antibody
tccacagacaattccaagaacacgctgtatctgcaaatgaaccgcctgagagccgaggacacggccgtatattactgtgcgaacacacgtctggtagctgctactcccagaggtacctggggccaggga

SEQ ID NO: 3305 - protein, 43 aa, Artificial Sequence
  Description of Artificial Sequence: Synthetic antibody
STDNSKNTLYLQMNRLRAEDTAVYYCANTRLVAATPRGTWGQG

SEQ ID NO: 3306 - DNA, 129 bp, Artificial Sequence
  Description of Artificial Sequence: Synthetic antibody
tccacagacaattccaacaacacgctgtatctgcaaatgaacagcctgagagccgaggacacggccgtatattactgtgcgaacacacgtctggtagctgctactcccagaggtacctggggccaggga

SEQ ID NO: 3307 - protein, 43 aa, Artificial Sequence
  Description of Artificial Sequence: Synthetic antibody
STDNSNNTLYLQMNSLRAEDTAVYYCANTRLVAATPRGTWGQG

SEQ ID NO: 3308 - DNA, 129 bp, Artificial Sequence
  Description of Artificial Sequence: Synthetic antibody
tccacacacaattccaagaacacgctgtatctgcaaatgaacagcctgagagccgaggacacggccgtatattactgtgcgaacacacgtctggtagctgctactcccagaggtacctggggccaggga

SEQ ID NO: 3309 - protein, 43 aa, Artificial Sequence
  Description of Artificial Sequence: Synthetic antibody
STHNSKNTLYLQMNSLRAEDTAVYYCANTRLVAATPRGTWGQG

SEQ ID NO: 3310 - protein, 20 aa, Artificial Sequence
  Description of Artificial Sequence: Synthetic antibody
CARGGQEGPGGDYYYGMDVW

SEQ ID NO: 3311 - DNA, 129 bp, Artificial Sequence
  Description of Artificial Sequence: Synthetic antibody
ttaagcacagcctacatggagctgagcagcctgagatctgaggacacggccgtgtattactgtgcgagaggcggacaggaagggccggggggagactactactacggtatggacgtctggggccaaggg

SEQ ID NO: 3312 - protein, 43 aa, Artificial Sequence
  Description of Artificial Sequence: Synthetic antibody
LSTAYMELSSLRSEDTAVYYCARGGQEGPGGDYYYGMDVWGQG

SEQ ID NO: 3313 - DNA, 129 bp, Artificial Sequence
  Description of Artificial Sequence: Synthetic antibody
ataagcacagcctacatggagctgagcagcctgagatctgaggacacggccgtgtattactgtgcgagaggcggacaggaagggccggggggagactactactacggtatggacgtctggggccaaggg

SEQ ID NO: 3314 - protein, 43 aa, Artificial Sequence
  Description of Artificial Sequence: Synthetic antibody
ISTAYMELSSLRSEDTAVYYCARGGQEGPGGDYYYGMDVWGQG

SEQ ID NO: 3315 - DNA, 129 bp, Artificial Sequence
  Description of Artificial Sequence: Synthetic antibody
ataaccacagcctacttggagctgagcagcctgagatctgaggacacggccgtgtattactgtgcgagaggcggacaggaagggccggggggagactactactacggtatggacgtctggggccaaggg

SEQ ID NO: 3316 - protein, 43 aa, Artificial Sequence
  Description of Artificial Sequence: Synthetic antibody
ITTAYLELSSLRSEDTAVYYCARGGQEGPGGDYYYGMDVWGQG

SEQ ID NO: 3317 - DNA, 129 bp, Artificial Sequence
  Description of Artificial Sequence: Synthetic antibody
ataaccacagcctacatggagctgagcagcctgagatctgaggacacggccgtgtattactgtgcgagaggcggacaggaagggccggggggagactactactacggtatggacgtctggggccaaggg

SEQ ID NO: 3318 - protein, 43 aa, Artificial Sequence
  Description of Artificial Sequence: Synthetic antibody
ITTAYMELSSLRSEDTAVYYCARGGQEGPGGDYYYGMDVWGQG

SEQ ID NO: 3319 - DNA, 129 bp, Artificial Sequence
  Description of Artificial Sequence: Synthetic antibody
ataaccacaccctacatggagctgagcagcctgagatctgaggacacggccgtgtattactgtgcgagaggcggacaggaagggccggggggagactactactacggtatggacgtctggggccaaggg

SEQ ID NO: 3320 - protein, 43 aa, Artificial Sequence
  Description of Artificial Sequence: Synthetic antibody
ITTPYMELSSLRSEDTAVYYCARGGQEGPGGDYYYGMDVWGQG

SEQ ID NO: 3321 - protein, 13 aa, Artificial Sequence
  Description of Artificial Sequence: Synthetic antibody
CARDKWAAGTGYW

SEQ ID NO: 3322 - DNA, 129 bp, Artificial Sequence
  Description of Artificial Sequence: Synthetic antibody
accatctccatacacaattccaagaacacgctgtatcttcaaatgaacagcctgagagccgaggacacggccgtgtattactgtgcgagagataagtgggcagctggtacgggctactggggccaggga

SEQ ID NO: 3323 - protein, 43 aa, Artificial Sequence
  Description of Artificial Sequence: Synthetic antibody
TISIHNSKNTLYLQMNSLRAEDTAVYYCARDKWAAGTGYWGQG

SEQ ID NO: 3324 - DNA, 129 bp, Artificial Sequence
  Description of Artificial Sequence: Synthetic antibody
accatctccagagacaattccaagaacacgctgtatcttcaaatgaacagcctgagagccgaggacacggccgtgtattactgtgcgagagataagtgggcagctggtacgggctactggggccaggga

SEQ ID NO: 3325 - protein, 43 aa, Artificial Sequence
  Description of Artificial Sequence: Synthetic antibody
TISRDNSKNTLYLQMNSLRAEDTAVYYCARDKWAAGTGYWGQG

SEQ ID NO: 3326 - DNA, 129 bp, Artificial Sequence
  Description of Artificial Sequence: Synthetic antibody
accatctccagacacaattccaagaacacgctgtatcttcaaatgaacagcctgagagccgaggacacggccgtgtattactgtgcgagagataagtgggcagctggtacgggctactggggccaggga

SEQ ID NO: 3327 - protein, 43 aa, Artificial Sequence
  Description of Artificial Sequence: Synthetic antibody
TISRHNSKNTLYLQMNSLRAEDTAVYYCARDKWAAGTGYWGQG

SEQ ID NO: 3328 - DNA, 129 bp, Artificial Sequence
  Description of Artificial Sequence: Synthetic antibody
accatctccagacacaattccaagaacacgctgtatcttcaaatcaacagcctgagagccgaggacacggccgtgtattactgtgcgagagataagtgggcagctggtacgggctactggggccaggga

SEQ ID NO: 3329 - protein, 43 aa, Artificial Sequence
  Description of Artificial Sequence: Synthetic antibody
TISRHNSKNTLYLQINSLRAEDTAVYYCARDKWAAGTGYWGQG

SEQ ID NO: 3330 - DNA, 129 bp, Artificial Sequence
  Description of Artificial Sequence: Synthetic antibody
aacatctccatagacaattccaagaacacgctgtatcttcaaatgaacagcctgagagccgaggacacggccgtgtattactgtgcgagagataagtgggcagctggtacgggctactggggccaggga

SEQ ID NO: 3331 - protein, 43 aa, Artificial Sequence
  Description of Artificial Sequence: Synthetic antibody
NISIDNSKNTLYLQMNSLRAEDTAVYYCARDKWAAGTGYWGQG

SEQ ID NO: 3332 - protein, 14 aa, Artificial Sequence
  Description of Artificial Sequence: Synthetic antibody
CVREPTGGRLFDYW

SEQ ID NO: 3333 - DNA, 129 bp, Artificial Sequence
  Description of Artificial Sequence: Synthetic antibody
atcaacgcagacacatccacgaaccaggtctccctgcagctgagctctatgactcccgaggacacggctatgtattactgtgtcagagagccgactgggggccgactctttgactactggggccaggga

SEQ ID NO: 3334 - protein, 43 aa, Artificial Sequence
  Description of Artificial Sequence: Synthetic antibody
INADTSTNQVSLQLSSMTPEDTAMYYCVREPTGGRLFDYWGQG

SEQ ID NO: 3335 - DNA, 129 bp, Artificial Sequence
  Description of Artificial Sequence: Synthetic antibody
atcaacgcagacacatccacgaaccaggtctccctgcagctgaactctgtgactcccgaggacacggctatgtattactgtgtcagagagccgactgggggccgactctttgactactggggccaggga

SEQ ID NO: 3336 - protein, 43 aa, Artificial Sequence
  Description of Artificial Sequence: Synthetic antibody
INADTSTNQVSLQLNSVTPEDTAMYYCVREPTGGRLFDYWGQG

SEQ ID NO: 3337 - DNA, 129 bp, Artificial Sequence
  Description of Artificial Sequence: Synthetic antibody
atcaacgcagacacatccacgaaccaggtctccctgcagctgaactctatgactcccgaggacacggctatgtattactgtgtcagagagccgactgggggccgactctttgactactggggccaggga

SEQ ID NO: 3338 - protein, 43 aa, Artificial Sequence
  Description of Artificial Sequence: Synthetic antibody
INADTSTNQVSLQLNSMTPEDTAMYYCVREPTGGRLFDYWGQG

SEQ ID NO: 3339 - DNA, 129 bp, Artificial Sequence
  Description of Artificial Sequence: Synthetic antibody
atcaacgcacacacatccacgaaccaggtctccctgcagctgaactctgtgactcccgaggacacggctatgtattactgtgtcagagagccgactgggggccgactctttgactactggggccaggga

SEQ ID NO: 3340 - protein, 43 aa, Artificial Sequence
  Description of Artificial Sequence: Synthetic antibody
INAHTSTNQVSLQLNSVTPEDTAMYYCVREPTGGRLFDYWGQG

SEQ ID NO: 3341 - DNA, 129 bp, Artificial Sequence
  Description of Artificial Sequence: Synthetic antibody
atcaacgcacacacatccacgaaccagggctccctgcagctgagctctatgactcccgaggacacggctatgtattactgtgtcagagagccgactgggggccgactctttgactactggggccaggga

SEQ ID NO: 3342 - protein, 43 aa, Artificial Sequence
  Description of Artificial Sequence: Synthetic antibody
INAHTSTNQGSLQLSSMTPEDTAMYYCVREPTGGRLFDYWGQG

SEQ ID NO: 3343 - protein, 19 aa, Artificial Sequence
  Description of Artificial Sequence: Synthetic antibody
CARLYSSSWYFIRGWFDPW

SEQ ID NO: 3344 - DNA, 129 bp, Artificial Sequence
  Description of Artificial Sequence: Synthetic antibody
tccaaaaccctggtggtccttacaatgaccaacatggaccctgtggacacagccacgtattactgtgcacggctctatagcagcagctggtactttatccgtggctggttcgacccctggggccaggga

SEQ ID NO: 3345 - protein, 43 aa, Artificial Sequence
  Description of Artificial Sequence: Synthetic antibody
SKTLVVLTMTNMDPVDTATYYCARLYSSSWYFIRGWFDPWGQG

SEQ ID NO: 3346 - DNA, 129 bp, Artificial Sequence
  Description of Artificial Sequence: Synthetic antibody
tccaaaaccccggtggtccttacaatgaccaacatggaccctgtggacacagccacgtattactgtgcacggctctatagcagcagctggtactttatccgtggctggttcgacccctggggccaggga

SEQ ID NO: 3347 - protein, 43 aa, Artificial Sequence
  Description of Artificial Sequence: Synthetic antibody
SKTPVVLTMTNMDPVDTATYYCARLYSSSWYFIRGWFDPWGQG

SEQ ID NO: 3348 - DNA, 129 bp, Artificial Sequence
  Description of Artificial Sequence: Synthetic antibody
tccaaaaaccaggtggtccttacaatgaccaacatggaccctgtggacacagccacgtattactgtgcacggctctatagcagcagctggtactttatccgtggctggttcgacccctggggccaggga

SEQ ID NO: 3349 - protein, 43 aa, Artificial Sequence
  Description of Artificial Sequence: Synthetic antibody
SKNQVVLTMTNMDPVDTATYYCARLYSSSWYFIRGWFDPWGQG

SEQ ID NO: 3350 - DNA, 129 bp, Artificial Sequence
  Description of Artificial Sequence: Synthetic antibody
tcaaaaaaccaggtggtccttacaatgaccaacatggaccctgtggacacagccacttattactgtgcacggctctatagcagcagctggtactttatccgtggctggttcgacccctggggccaggga

SEQ ID NO: 3351 - DNA, 129 bp, Artificial Sequence
  Description of Artificial Sequence: Synthetic antibody
ctccaaaaccaggtggtccttacaatgaccaacatggaccctgtggacacagccacgtattactgtgcacggctctatagcagcagctggtactttatccgtggctggttcgacccctggggccaggga

SEQ ID NO: 3352 - protein, 43 aa, Artificial Sequence
  Description of Artificial Sequence: Synthetic antibody
LQNQVVLTMTNMDPVDTATYYCARLYSSSWYFIRGWFDPWGQG

SEQ ID NO: 3353 - protein, 11 aa, Artificial Sequence
  Description of Artificial Sequence: Synthetic antibody
CLRDWPPGNFW

SEQ ID NO: 3354 - DNA, 129 bp, Artificial Sequence
  Description of Artificial Sequence: Synthetic antibody
cggttcaccatctccagatacaattccaagaacacgctgtatctgcaaatgaacagcctgagagacgaggacacggccgtatattactgtcttagagactggccccctgggaacttctggggccaggga

SEQ ID NO: 3355 - protein, 43 aa, Artificial Sequence
  Description of Artificial Sequence: Synthetic antibody
RFTISRYNSKNTLYLQMNSLRDEDTAVYYCLRDWPPGNFWGQG

SEQ ID NO: 3356 - DNA, 129 bp, Artificial Sequence
  Description of Artificial Sequence: Synthetic antibody
cggttcaccatctccagatacaattccaagaacacgctgtatctgcaaatcaacagcctgagagacgaggacacggccgtatattactgtcttagagactggccccctgggaacttctggggccaggga

SEQ ID NO: 3357 - protein, 43 aa, Artificial Sequence
  Description of Artificial Sequence: Synthetic antibody
RFTISRYNSKNTLYLQINSLRDEDTAVYYCLRDWPPGNFWGQG

SEQ ID NO: 3358 - DNA, 129 bp, Artificial Sequence
  Description of Artificial Sequence: Synthetic antibody
cggttcaccatctccagagacaattccaagaacacgctgtatctgcaaatgaacagcctgagagacgaggacacggccgtatattactgtcttagagactggccccctgggaacttctggggccaggga

SEQ ID NO: 3359 - protein, 43 aa, Artificial Sequence
  Description of Artificial Sequence: Synthetic antibody
RFTISRDNSKNTLYLQMNSLRDEDTAVYYCLRDWPPGNFWGQG

SEQ ID NO: 3360 - DNA, 129 bp, Artificial Sequence
  Description of Artificial Sequence: Synthetic antibody
cggttcaccatctccagacacaattccaagaacacgctgtatctgcaaatcaacagcctgagagacgaggacacggccgtatattactgtcttagagactggccccctgggaacttctggggccaggga

SEQ ID NO: 3361 - protein, 43 aa, Artificial Sequence
  Description of Artificial Sequence: Synthetic antibody
RFTISRHNSKNTLYLQINSLRDEDTAVYYCLRDWPPGNFWGQG

SEQ ID NO: 3362 - DNA, 129 bp, Artificial Sequence
  Description of Artificial Sequence: Synthetic antibody
cggttcaccatctccagacaaaattccaagaacacgctgtatctgcaaatgaacagcctgagagacgaggacacggccgtatattactgtcttagagactggccccctgggaacttctggggccaggga

SEQ ID NO: 3363 - protein, 43 aa, Artificial Sequence
  Description of Artificial Sequence: Synthetic antibody
RFTISRQNSKNTLYLQMNSLRDEDTAVYYCLRDWPPGNFWGQG

SEQ ID NO: 3364 - protein, 14 aa, Artificial Sequence
  Description of Artificial Sequence: Synthetic antibody
CALHYGSGRSFDYW

SEQ ID NO: 3365 - DNA, 129 bp, Artificial Sequence
  Description of Artificial Sequence: Synthetic antibody
atctccatatataattccaagaacacgctgtatctgcaaatgaacagcctgagagccgaggacacggccgtatattactgtgcgttacactatggttcggggcggagctttgactactggggccaggga

SEQ ID NO: 3366 - protein, 43 aa, Artificial Sequence
  Description of Artificial Sequence: Synthetic antibody
ISIYNSKNTLYLQMNSLRAEDTAVYYCALHYGSGRSFDYWGQG

SEQ ID NO: 3367 - DNA, 129 bp, Artificial Sequence
  Description of Artificial Sequence: Synthetic antibody
atctccatatataattccaacaacacgctgtatctgcaaatgaacagcctgagagccgaggacacggccgtatattactgtgcgttacactatggttcggggcggagctttgactactggggccaggga

SEQ ID NO: 3368 - protein, 43 aa, Artificial Sequence
  Description of Artificial Sequence: Synthetic antibody
ISIYNSNNTLYLQMNSLRAEDTAVYYCALHYGSGRSFDYWGQG

SEQ ID NO: 3369 - DNA, 129 bp, Artificial Sequence
  Description of Artificial Sequence: Synthetic antibody
atctccatacataattccaagaacacgctgtatctgcaaatgaacagcctgagagccgaggacacggccgtatattactgtgcgttacactatggttcggggcggagctttgactactggggccaggga

SEQ ID NO: 3370 - protein, 43 aa, Artificial Sequence
  Description of Artificial Sequence: Synthetic antibody
ISIHNSKNTLYLQMNSLRAEDTAVYYCALHYGSGRSFDYWGQG

SEQ ID NO: 3371 - DNA, 129 bp, Artificial Sequence
  Description of Artificial Sequence: Synthetic antibody
atctccagagataattccaagaacacgctgtatctgcaaatgaacagcctgagagccgaggacacggccgtatattactgtgcgttacactatggttcggggcggagctttgactactggggccaggga

SEQ ID NO: 3372 - protein, 43 aa, Artificial Sequence
  Description of Artificial Sequence: Synthetic antibody
ISRDNSKNTLYLQMNSLRAEDTAVYYCALHYGSGRSFDYWGQG

SEQ ID NO: 3373 - DNA, 129 bp, Artificial Sequence
  Description of Artificial Sequence: Synthetic antibody
atctccagacataattccaacaacacgctgtatctgcaaatgaacagcctgagagccgaggacacggccgtatattactgtgcgttacactatggttcggggcggagctttgactactggggccaggga

SEQ ID NO: 3374 - protein, 43 aa, Artificial Sequence
  Description of Artificial Sequence: Synthetic antibody
ISRHNSNNTLYLQMNSLRAEDTAVYYCALHYGSGRSFDYWGQG

SEQ ID NO: 3375 - protein, 13 aa, Artificial Sequence
  Description of Artificial Sequence: Synthetic antibody
CAKGNRDSGWTPW

SEQ ID NO: 3376 - DNA, 129 bp, Artificial Sequence
  Description of Artificial Sequence: Synthetic antibody
accatctccatagacaattccaagaacacgctctatctgcaaatgaacagcctgagagccgaggacacggccgtatattactgtgcgaaaggtaatcgggacagtggctggaccccctggggccaggga

SEQ ID NO: 3377 - protein, 43 aa, Artificial Sequence
  Description of Artificial Sequence: Synthetic antibody
TISIDNSKNTLYLQMNSLRAEDTAVYYCAKGNRDSGWTPWGQG

SEQ ID NO: 3378 - DNA, 129 bp, Artificial Sequence
  Description of Artificial Sequence: Synthetic antibody
accatctccatacacaattccaagaacacgctctatctgcaaatgaacagcctgagagccgaggacacggccgtatattactgtgcgaaaggtaatcgggacagtggctggaccccctggggccaggga

SEQ ID NO: 3379 - protein, 43 aa, Artificial Sequence
  Description of Artificial Sequence: Synthetic antibody
TISIHNSKNTLYLQMNSLRAEDTAVYYCAKGNRDSGWTPWGQG

SEQ ID NO: 3380 - DNA, 129 bp, Artificial Sequence
  Description of Artificial Sequence: Synthetic antibody
accatctccagagacaattccaagaacacgctctatctgcaaatgaacagcctgagagccgaggacacggccgtatattactgtgcgaaaggtaatcgggacagtggctggaccccctggggccaggga

SEQ ID NO: 3381 - protein, 43 aa, Artificial Sequence
  Description of Artificial Sequence: Synthetic antibody
TISRDNSKNTLYLQMNSLRAEDTAVYYCAKGNRDSGWTPWGQG

SEQ ID NO: 3382 - DNA, 129 bp, Artificial Sequence
  Description of Artificial Sequence: Synthetic antibody
accatctccagacacaattccaagaacacgctctatctgcaaatgaacagcctgagagccgaggacacggccgtatattactgtgcgaaaggtaatcgggacagtggctggaccccctggggccaggga

SEQ ID NO: 3383 - protein, 43 aa, Artificial Sequence
  Description of Artificial Sequence: Synthetic antibody
TISRHNSKNTLYLQMNSLRAEDTAVYYCAKGNRDSGWTPWGQG

SEQ ID NO: 3384 - DNA, 129 bp, Artificial Sequence
  Description of Artificial Sequence: Synthetic antibody
accatctccacacacaattccaagaacacgctctatctgcaaatgaacagcctgagagccgaggacacggccgtatattactgtgcgaaaggtaatcgggacagtggctggaccccctggggccaggga

SEQ ID NO: 3385 - protein, 43 aa, Artificial Sequence
  Description of Artificial Sequence: Synthetic antibody
TISTHNSKNTLYLQMNSLRAEDTAVYYCAKGNRDSGWTPWGQG

SEQ ID NO: 3386 - protein, 14 aa, Artificial Sequence
  Description of Artificial Sequence: Synthetic antibody
CAKDRVDGYGDYPW

SEQ ID NO: 3387 - DNA, 129 bp, Artificial Sequence
  Description of Artificial Sequence: Synthetic antibody
atctccatagacaattccaagaatactctgtatctgcaaatgaacagcctgagagccgaggacacggccgtatattcctgtgcgaaagaccgtgtggacggctacggtgactatccctggggccaggga

SEQ ID NO: 3388 - protein, 43 aa, Artificial Sequence
  Description of Artificial Sequence: Synthetic antibody
ISIDNSKNTLYLQMNSLRAEDTAVYSCAKDRVDGYGDYPWGQG

SEQ ID NO: 3389 - DNA, 129 bp, Artificial Sequence
  Description of Artificial Sequence: Synthetic antibody
atctccatacacaattccaagaatactctgtatctgcaaatgaacagcctgagagccgaggacacggccgtatattcctgtgcgaaagaccgtgtggacggctacggtgactatccctggggccaggga

SEQ ID NO: 3390 - protein, 43 aa, Artificial Sequence
  Description of Artificial Sequence: Synthetic antibody
ISIHNSKNTLYLQMNSLRAEDTAVYSCAKDRVDGYGDYPWGQG

SEQ ID NO: 3391 - DNA, 129 bp, Artificial Sequence
  Description of Artificial Sequence: Synthetic antibody
atctccagagacaattccaagaatactctgtatctgcaaatgaacagcctgagagccgaggacacggccgtatattcctgtgcgaaagaccgtgtggacggctacggtgactatccctggggccaggga

SEQ ID NO: 3392 - protein, 43 aa, Artificial Sequence
  Description of Artificial Sequence: Synthetic antibody
ISRDNSKNTLYLQMNSLRAEDTAVYSCAKDRVDGYGDYPWGQG

SEQ ID NO: 3393 - DNA, 129 bp, Artificial Sequence
  Description of Artificial Sequence: Synthetic antibody
atctccagacacaattccaataatactctgtatctgcaaatgaacagcctgagagccgaggacacggccgtatattcctgtgcgaaagaccgtgtggacggctacggtgactatccctggggccaggga

SEQ ID NO: 3394 - protein, 43 aa, Artificial Sequence
  Description of Artificial Sequence: Synthetic antibody
ISRHNSNNTLYLQMNSLRAEDTAVYSCAKDRVDGYGDYPWGQG

SEQ ID NO: 3395 - DNA, 129 bp, Artificial Sequence
  Description of Artificial Sequence: Synthetic antibody
atctccacagacaattccaataatactctgtatctgcaaatgaacagcctgagagccgaggacacggccgtatattcctgtgcgaaagaccgtgtggacggctacggtgactatccctggggccaggga

SEQ ID NO: 3396 - protein, 43 aa, Artificial Sequence
  Description of Artificial Sequence: Synthetic antibody
ISTDNSNNTLYLQMNSLRAEDTAVYSCAKDRVDGYGDYPWGQG

SEQ ID NO: 3397 - protein, 14 aa, Artificial Sequence
  Description of Artificial Sequence: Synthetic antibody
CVREPSNTLYFDFW

SEQ ID NO: 3398 - DNA, 129 bp, Artificial Sequence
  Description of Artificial Sequence: Synthetic antibody
ttgaccggggacacgtccacgagcacagtctacatggaactgagcagcctgagatctgaggacacggccgtgtatttctgtgtgagagagccctctaatactctgtactttgacttctggggccaggga

SEQ ID NO: 3399 - protein, 43 aa, Artificial Sequence
  Description of Artificial Sequence: Synthetic antibody
LTGDTSTSTVYMELSSLRSEDTAVYFCVREPSNTLYFDFWGQG

SEQ ID NO: 3400 - DNA, 129 bp, Artificial Sequence
  Description of Artificial Sequence: Synthetic antibody
ttgaccggggacacgtccacgagcacagtctacatggaactgagcagcctgagatctgaggacacggccgtgtatttctgtgtgagagagccctccaatactctgtactttgacttctggggccaggga

SEQ ID NO: 3401 - DNA, 129 bp, Artificial Sequence
  Description of Artificial Sequence: Synthetic antibody
atgaccgggggcacgtccacgagcacagtctacatggaactgagcagcctgagatctgaggacacggccgtgtatttctgtgtgagagagccctccaatactctgtactttgacttctggggccaggga

SEQ ID NO: 3402 - protein, 43 aa, Artificial Sequence
  Description of Artificial Sequence: Synthetic antibody
MTGGTSTSTVYMELSSLRSEDTAVYFCVREPSNTLYFDFWGQG

SEQ ID NO: 3403 - DNA, 129 bp, Artificial Sequence
  Description of Artificial Sequence: Synthetic antibody
atgaccggggacacgtccacgagcacagtctacatggaactgagcagcctgagatctgaggacacggccgtgtatttctgtgtgagagagccctctaatactctgtactttgacttctggggccaggga

SEQ ID NO: 3404 - protein, 43 aa, Artificial Sequence
  Description of Artificial Sequence: Synthetic antibody
MTGDTSTSTVYMELSSLRSEDTAVYFCVREPSNTLYFDFWGQG

SEQ ID NO: 3405 - DNA, 129 bp, Artificial Sequence
  Description of Artificial Sequence: Synthetic antibody
atgaccggggacacgtccacgagcacagtctacatggaactgagcagcctgagatctgaggacacggccgtgtatttctgtgtgagagagccctccaatactctgtactttgacttctggggccaggga

SEQ ID NO: 3406 - protein, 16 aa, Artificial Sequence
  Description of Artificial Sequence: Synthetic antibody
CARDLDKSGDWYFDLW

SEQ ID NO: 3407 - DNA, 129 bp, Artificial Sequence
  Description of Artificial Sequence: Synthetic antibody
cggacaaatcccacgaccacagcctacatggaactgaccagcctgagacctgaggacacggccatgtatttctgtgcgcgagatctagataaatctggggactggtacttcgatctctggggccgtggc

SEQ ID NO: 3408 - protein, 43 aa, Artificial Sequence
  Description of Artificial Sequence: Synthetic antibody
RTNPTTTAYMELTSLRPEDTAMYFCARDLDKSGDWYFDLWGRG

SEQ ID NO: 3409 - DNA, 129 bp, Artificial Sequence
  Description of Artificial Sequence: Synthetic antibody
gcgtacaaacccacgaccacagcctacatggaactgaccagcctgagacctgaggacacggccatgtatttctgtgcgcgagatctagataaatctggggactggtacttcgatctctggggccgtggc

SEQ ID NO: 3410 - protein, 43 aa, Artificial Sequence
  Description of Artificial Sequence: Synthetic antibody
AYKPTTTAYMELTSLRPEDTAMYFCARDLDKSGDWYFDLWGRG

SEQ ID NO: 3411 - DNA, 129 bp, Artificial Sequence
  Description of Artificial Sequence: Synthetic antibody
gcggacaaatccacgaccacagcctacatggaactgaccagcctgagacctgaggacacggccatgtatttctgtgcgcgagatctagataaatctggggactggtacttcgatctctggggccgtggc

SEQ ID NO: 3412 - protein, 43 aa, Artificial Sequence
  Description of Artificial Sequence: Synthetic antibody
ADKSTTTAYMELTSLRPEDTAMYFCARDLDKSGDWYFDLWGRG

SEQ ID NO: 3413 - DNA, 129 bp, Artificial Sequence
  Description of Artificial Sequence: Synthetic antibody
gcggaaaaacccacgaccacagcctacatggaactgaccagcctgagacctgaggacacggccatgtatttctgtgcgcgagatctagataaatctggggactggtacttcgatctctggggccgtggc

SEQ ID NO: 3414 - protein, 43 aa, Artificial Sequence
  Description of Artificial Sequence: Synthetic antibody
AEKPTTTAYMELTSLRPEDTAMYFCARDLDKSGDWYFDLWGRG

SEQ ID NO: 3415 - DNA, 129 bp, Artificial Sequence
  Description of Artificial Sequence: Synthetic antibody
gcgaacaaacccacgaccacagcctacatggaactgaccagcctgagacctgaggacacggccatgtatttctgtgcgcgagatctagataaatctggggactggtacttcgatctctggggccgtggc

SEQ ID NO: 3416 - protein, 43 aa, Artificial Sequence
  Description of Artificial Sequence: Synthetic antibody
ANKPTTTAYMELTSLRPEDTAMYFCARDLDKSGDWYFDLWGRG

SEQ ID NO: 3417 - protein, 11 aa, Artificial Sequence
  Description of Artificial Sequence: Synthetic antibody
CARGGDYYGDW

SEQ ID NO: 3418 - DNA, 129 bp, Artificial Sequence
  Description of Artificial Sequence: Synthetic antibody
cgattcaccatctccagagacaattccaagaacacgctgtatcttcaaatgaacagcctgagagccgaagacacggccgtgtattactgtgcgagaggcggtgactactacggggactggggccaggga

SEQ ID NO: 3419 - protein, 43 aa, Artificial Sequence
  Description of Artificial Sequence: Synthetic antibody
RFTISRDNSKNTLYLQMNSLRAEDTAVYYCARGGDYYGDWGQG

SEQ ID NO: 3420 - DNA, 129 bp, Artificial Sequence
  Description of Artificial Sequence: Synthetic antibody
cgattcaccatctccagagacaattccaacaacacgctgtatcttcaaatcaacagcctgagagccgaagacacggccgtgtattactgtgcgagaggcggtgactactacggggactggggccaggga

SEQ ID NO: 3421 - protein, 43 aa, Artificial Sequence
  Description of Artificial Sequence: Synthetic antibody
RFTISRDNSNNTLYLQINSLRAEDTAVYYCARGGDYYGDWGQG

SEQ ID NO: 3422 - DNA, 129 bp, Artificial Sequence
  Description of Artificial Sequence: Synthetic antibody
cgattcaccatctccagagacaataccaagaacacgctgtatcttcaaatcaacagcctgagagccgaagacacggccgtgtattactgtgcgagaggcggtgactactacggggactggggccaggga

SEQ ID NO: 3423 - protein, 43 aa, Artificial Sequence
  Description of Artificial Sequence: Synthetic antibody
RFTISRDNTKNTLYLQINSLRAEDTAVYYCARGGDYYGDWGQG

SEQ ID NO: 3424 - DNA, 129 bp, Artificial Sequence
  Description of Artificial Sequence: Synthetic antibody
cgattcaccatctccagacacaattccaagaacacgctgtatcttcaaatcaacagcctgagagccgaagacacggccgtgtattactgtgcgagaggcggtgactactacggggactggggccaggga

SEQ ID NO: 3425 - protein, 43 aa, Artificial Sequence
  Description of Artificial Sequence: Synthetic antibody
RFTISRHNSKNTLYLQINSLRAEDTAVYYCARGGDYYGDWGQG

SEQ ID NO: 3426 - DNA, 129 bp, Artificial Sequence
  Description of Artificial Sequence: Synthetic antibody
cgatacaccatctccagagacaattccaagaacacgctgtatcttcaaatcaacagcctgagagccgaagacacggccgtgtattactgtgcgagaggcggtgactactacggggactggggccaggga

SEQ ID NO: 3427 - protein, 43 aa, Artificial Sequence
  Description of Artificial Sequence: Synthetic antibody
RYTISRDNSKNTLYLQINSLRAEDTAVYYCARGGDYYGDWGQG

SEQ ID NO: 3428 - protein, 15 aa, Artificial Sequence
  Description of Artificial Sequence: Synthetic antibody
CAKRVVLAADAFDVW

SEQ ID NO: 3429 - DNA, 129 bp, Artificial Sequence
  Description of Artificial Sequence: Synthetic antibody
acctgggacacctccataaccacagcctacatggagctgagcagcctgagatctgaagacacggccgtatattactgtgcgaaaagggtggtattagctgccgacgcttttgatgtctggggccaaggg

SEQ ID NO: 3430 - protein, 43 aa, Artificial Sequence
  Description of Artificial Sequence: Synthetic antibody
TWDTSITTAYMELSSLRSEDTAVYYCAKRVVLAADAFDVWGQG

SEQ ID NO: 3431 - DNA, 129 bp, Artificial Sequence
  Description of Artificial Sequence: Synthetic antibody
accagggacacctccataaccacagcctacatggagctgagcggcctgagatctgaagacacggccgtatattactgtgcgaaaagggtggtattagctgccgacgcttttgatgtctggggccaaggg

SEQ ID NO: 3432 - protein, 43 aa, Artificial Sequence
  Description of Artificial Sequence: Synthetic antibody
TRDTSITTAYMELSGLRSEDTAVYYCAKRVVLAADAFDVWGQG

SEQ ID NO: 3433 - DNA, 129 bp, Artificial Sequence
  Description of Artificial Sequence: Synthetic antibody
accagggacacctccataaccacagcctacatggagctgagcagcctgagatctgaagacacggccgtatattactgtgcgaaaagggtggtattagctgccgacgcttttgatgtctggggccaaggg

SEQ ID NO: 3434 - protein, 43 aa, Artificial Sequence
  Description of Artificial Sequence: Synthetic antibody
TRDTSITTAYMELSSLRSEDTAVYYCAKRVVLAADAFDVWGQG

SEQ ID NO: 3435 - DNA, 129 bp, Artificial Sequence
  Description of Artificial Sequence: Synthetic antibody
accagggacacctccataaccacaccctacatggagctgagcagcctgagatctgaagacacggccgtatattactgtgcgaaaagggtggtattagctgccgacgcttttgatgtctggggccaaggg

SEQ ID NO: 3436 - protein, 43 aa, Artificial Sequence
  Description of Artificial Sequence: Synthetic antibody
TRDTSITTPYMELSSLRSEDTAVYYCAKRVVLAADAFDVWGQG

SEQ ID NO: 3437 - DNA, 129 bp, Artificial Sequence
  Description of Artificial Sequence: Synthetic antibody
accaggcacacctccataaccacagcctacatggagctgagcagcctgagatctgaagacacggccgtatattactgtgcgaaaagggtggtattagctgccgacgcttttgatgtctggggccaaggg

SEQ ID NO: 3438 - protein, 43 aa, Artificial Sequence
  Description of Artificial Sequence: Synthetic antibody
TRHTSITTAYMELSSLRSEDTAVYYCAKRVVLAADAFDVWGQG

SEQ ID NO: 3439 - protein, 16 aa, Artificial Sequence
  Description of Artificial Sequence: Synthetic antibody
CAKQIGGYSYGYTDVW

SEQ ID NO: 3440 - DNA, 129 bp, Artificial Sequence
  Description of Artificial Sequence: Synthetic antibody
tgtgatagctccaagaacacgctgtatctgcaaatgaacagcctgagagccgaggacacggccgtatattactgtgcgaaacaaattggtggatacagctatggttatacggacgtctggggccaaggg

SEQ ID NO: 3441 - protein, 43 aa, Artificial Sequence
  Description of Artificial Sequence: Synthetic antibody
CDSSKNTLYLQMNSLRAEDTAVYYCAKQIGGYSYGYTDVWGQG

SEQ ID NO: 3442 - DNA, 129 bp, Artificial Sequence
  Description of Artificial Sequence: Synthetic antibody
atatataactccaagaacacgctgtatctgcaaatgaacagcctgagagccgaggacacggccgtatattactgtgcgaaacaaattggtggatacagctatggttatacggacgtctggggccaaggg

SEQ ID NO: 3443 - protein, 43 aa, Artificial Sequence
  Description of Artificial Sequence: Synthetic antibody
IYNSKNTLYLQMNSLRAEDTAVYYCAKQIGGYSYGYTDVWGQG

SEQ ID NO: 3444 - DNA, 129 bp, Artificial Sequence
  Description of Artificial Sequence: Synthetic antibody
agatataactccaacaacacgctgtatctgcaaatgaacagcctgagagccgaggacacggccgtatattactgtgcgaaacaaattggtggatacagctatggttatacggacgtctggggccaaggg

SEQ ID NO: 3445 - protein, 43 aa, Artificial Sequence
  Description of Artificial Sequence: Synthetic antibody
RYNSNNTLYLQMNSLRAEDTAVYYCAKQIGGYSYGYTDVWGQG

SEQ ID NO: 3446 - DNA, 129 bp, Artificial Sequence
  Description of Artificial Sequence: Synthetic antibody
agagatagctccaagaacacgctgtatctgcaaatgaacagcctgagagccgaggacacggccgtatattactgtgcgaaacaaattggtggatacagctatggttatacggacgtctggggccaaggg

SEQ ID NO: 3447 - protein, 43 aa, Artificial Sequence
  Description of Artificial Sequence: Synthetic antibody
RDSSKNTLYLQMNSLRAEDTAVYYCAKQIGGYSYGYTDVWGQG

SEQ ID NO: 3448 - DNA, 129 bp, Artificial Sequence
  Description of Artificial Sequence: Synthetic antibody
agagataactccaagaacacgctgtatctgcaaatgaacagcctgagagccgaggacacggccgtatattactgtgcgaaacaaattggtggatacagctatggttatacggacgtctggggccaaggg

SEQ ID NO: 3449 - protein, 43 aa, Artificial Sequence
  Description of Artificial Sequence: Synthetic antibody
RDNSKNTLYLQMNSLRAEDTAVYYCAKQIGGYSYGYTDVWGQG

SEQ ID NO: 3450 - protein, 15 aa, Artificial Sequence
  Description of Artificial Sequence: Synthetic antibody
CAKGLWFGGGWFDPW

SEQ ID NO: 3451 - DNA, 129 bp, Artificial Sequence
  Description of Artificial Sequence: Synthetic antibody
tccagagataattccaagaacacgctgtatctgcaaatgaacagcctgagagccgaggacacggccgtatattactgtgcgaaaggactatggttcggggggggctggttcgacccctggggccaggga

SEQ ID NO: 3452 - protein, 43 aa, Artificial Sequence
  Description of Artificial Sequence: Synthetic antibody
SRDNSKNTLYLQMNSLRAEDTAVYYCAKGLWFGGGWFDPWGQG

SEQ ID NO: 3453 - DNA, 129 bp, Artificial Sequence
  Description of Artificial Sequence: Synthetic antibody
tccagagataattccaacaacacgctgtatctgcaaatgaacagcctgagagccgaggacacggccgtatattactgtgcgaaaggactatggttcggggggggctggttcgacccctggggccaggga

SEQ ID NO: 3454 - protein, 43 aa, Artificial Sequence
  Description of Artificial Sequence: Synthetic antibody
SRDNSNNTLYLQMNSLRAEDTAVYYCAKGLWFGGGWFDPWGQG

SEQ ID NO: 3455 - DNA, 129 bp, Artificial Sequence
  Description of Artificial Sequence: Synthetic antibody
tccagacataattccaacaacacgctgtatctgcaaatgaacagcctgagagccgaggacacggccgtatattactgtgcgaaaggactatggttcggggggggctggttcgacccctggggccaggga

SEQ ID NO: 3456 - protein, 43 aa, Artificial Sequence
  Description of Artificial Sequence: Synthetic antibody
SRHNSNNTLYLQMNSLRAEDTAVYYCAKGLWFGGGWFDPWGQG

SEQ ID NO: 3457 - DNA, 129 bp, Artificial Sequence
  Description of Artificial Sequence: Synthetic antibody
tccacagataattccaacaacacgctgtatctgcaaatgaacagcctgagagccgaggacacggccgtatattactgtgcgaaaggactatggttcggggggggctggttcgacccctggggccaggga

SEQ ID NO: 3458 - protein, 43 aa, Artificial Sequence
  Description of Artificial Sequence: Synthetic antibody
STDNSNNTLYLQMNSLRAEDTAVYYCAKGLWFGGGWFDPWGQG

SEQ ID NO: 3459 - DNA, 129 bp, Artificial Sequence
  Description of Artificial Sequence: Synthetic antibody
tacagagataattccaagaacacgctgtatctgcaaatgaaccgcctgagagccgaggacacggccgtatattactgtgcgaaaggactatggttcggggggggctggttcgacccctggggccaggga

SEQ ID NO: 3460 - protein, 43 aa, Artificial Sequence
  Description of Artificial Sequence: Synthetic antibody
YRDNSKNTLYLQMNRLRAEDTAVYYCAKGLWFGGGWFDPWGQG

SEQ ID NO: 3461 - protein, 14 aa, Artificial Sequence
  Description of Artificial Sequence: Synthetic antibody
CAKNSGYDYYFDYW

SEQ ID NO: 3462 - DNA, 129 bp, Artificial Sequence
  Description of Artificial Sequence: Synthetic antibody
atctccatacataattccaagaacacgctgtatctgcaaatgaacagcctgagagccgaggacacggccgtatattactgtgcgaaaaatagtggctacgattactactttgactactggggccaggga

SEQ ID NO: 3463 - protein, 43 aa, Artificial Sequence
  Description of Artificial Sequence: Synthetic antibody
ISIHNSKNTLYLQMNSLRAEDTAVYYCAKNSGYDYYFDYWGQG

SEQ ID NO: 3464 - DNA, 129 bp, Artificial Sequence
  Description of Artificial Sequence: Synthetic antibody
atctccagagataattccaagaacacgctgtatctgcaaatgaacagcctgagagccgaggacacggccgtatattactgtgcgaaaaatagtggctacgattactactttgactactggggccaggga

SEQ ID NO: 3465 - protein, 43 aa, Artificial Sequence
  Description of Artificial Sequence: Synthetic antibody
ISRDNSKNTLYLQMNSLRAEDTAVYYCAKNSGYDYYFDYWGQG

SEQ ID NO: 3466 - DNA, 129 bp, Artificial Sequence
  Description of Artificial Sequence: Synthetic antibody
atctccagagataattccaagaacacgctgtatctgcaaatgaacagcctgagagccgaggacacgaccgtatattactgtgcgaaaaatagtggctacgattactactttgactactggggccaggga

SEQ ID NO: 3467 - protein, 43 aa, Artificial Sequence
  Description of Artificial Sequence: Synthetic antibody
ISRDNSKNTLYLQMNSLRAEDTTVYYCAKNSGYDYYFDYWGQG

SEQ ID NO: 3468 - DNA, 129 bp, Artificial Sequence
  Description of Artificial Sequence: Synthetic antibody
atctccagagataattccaacaacacgctgtatctgcaaatgaacagcctgagagccgaggacacgaccgtatattactgtgcgaaaaatagtggctacgattactactttgactactggggccaggga

SEQ ID NO: 3469 - protein, 43 aa, Artificial Sequence
  Description of Artificial Sequence: Synthetic antibody
ISRDNSNNTLYLQMNSLRAEDTTVYYCAKNSGYDYYFDYWGQG

SEQ ID NO: 3470 - DNA, 129 bp, Artificial Sequence
  Description of Artificial Sequence: Synthetic antibody
atctccagacataattccaagaacacgctgtatctgcaaatgaacagcctgagagccgaggacacgaccgtatattactgtgcgaaaaatagtggctacgattactactttgactactggggccaggga

SEQ ID NO: 3471 - protein, 43 aa, Artificial Sequence
  Description of Artificial Sequence: Synthetic antibody
ISRHNSKNTLYLQMNSLRAEDTTVYYCAKNSGYDYYFDYWGQG

SEQ ID NO: 3472 - protein, 13 aa, Artificial Sequence
  Description of Artificial Sequence: Synthetic antibody
CARDSSGWSRDYW

SEQ ID NO: 3473 - DNA, 129 bp, Artificial Sequence
  Description of Artificial Sequence: Synthetic antibody
accatctccatagattattccaagaacactctgtatctgcaaatgaacagcctgagagtcgaagacacggccatatattactgtgcgagagatagtagtggctggtcccgtgattactggggccaggga

SEQ ID NO: 3474 - protein, 43 aa, Artificial Sequence
  Description of Artificial Sequence: Synthetic antibody
TISIDYSKNTLYLQMNSLRVEDTAIYYCARDSSGWSRDYWGQG

SEQ ID NO: 3475 - DNA, 129 bp, Artificial Sequence
  Description of Artificial Sequence: Synthetic antibody
accatctccatagatgattccaagaacactctgtatctgcaaatgaacagcctgagagtcgaagacacggccatatattactgtgcgagagatagtagtggctggtcccgtgattactggggccaggga

SEQ ID NO: 3476 - protein, 43 aa, Artificial Sequence
  Description of Artificial Sequence: Synthetic antibody
TISIDDSKNTLYLQMNSLRVEDTAIYYCARDSSGWSRDYWGQG

SEQ ID NO: 3477 - DNA, 129 bp, Artificial Sequence
  Description of Artificial Sequence: Synthetic antibody
accatctccagagattattccaagaacactctgtatctgcaaatgaacagcctgagagtcgaagacacggccatatattactgtgcgagagatagtagtggctggtcccgtgattactggggccaggga

SEQ ID NO: 3478 - protein, 43 aa, Artificial Sequence
  Description of Artificial Sequence: Synthetic antibody
TISRDYSKNTLYLQMNSLRVEDTAIYYCARDSSGWSRDYWGQG

SEQ ID NO: 3479 - DNA, 129 bp, Artificial Sequence
  Description of Artificial Sequence: Synthetic antibody
accatctccagagatgattccaagaacactctgtatctgcaaatgaacagcctgagagtcgaagacacggccatatattactgtgcgagagatagtagtggctggtcccgtgattactggggccaggga

SEQ ID NO: 3480 - protein, 43 aa, Artificial Sequence
  Description of Artificial Sequence: Synthetic antibody
TISRDDSKNTLYLQMNSLRVEDTAIYYCARDSSGWSRDYWGQG

SEQ ID NO: 3481 - DNA, 129 bp, Artificial Sequence
  Description of Artificial Sequence: Synthetic antibody
aacatctccagatattattccaagaacactctgtatctgcaaatgaacagcctgagaggcgaacacacggccatatattactgtgcgagagatagtagtggctggtcccgtgattactggggccaggga

SEQ ID NO: 3482 - protein, 43 aa, Artificial Sequence
  Description of Artificial Sequence: Synthetic antibody
NISRYYSKNTLYLQMNSLRGEHTAIYYCARDSSGWSRDYWGQG

SEQ ID NO: 3483 - protein, 13 aa, Artificial Sequence
  Description of Artificial Sequence: Synthetic antibody
CIRGGSPDYFDYW

SEQ ID NO: 3484 - DNA, 129 bp, Artificial Sequence
  Description of Artificial Sequence: Synthetic antibody
tgcatttccagagatcattcaaagaacacggcgtatctgcagatgaacagcctgaaaaccgaagacacggccgtctattattgtatcagaggtgggagccctgactactttgactattggggccaggga

SEQ ID NO: 3485 - protein, 43 aa, Artificial Sequence
  Description of Artificial Sequence: Synthetic antibody
CISRDHSKNTAYLQMNSLKTEDTAVYYCIRGGSPDYFDYWGQG

SEQ ID NO: 3486 - DNA, 129 bp, Artificial Sequence
  Description of Artificial Sequence: Synthetic antibody
tgcatttccagacatgattcaaagaacacggcgtatctgcagatgaacagcctgaaaaccgaagacacggccgtctattattgtatcagaggtgggagccctgactactttgactattggggccaggga

SEQ ID NO: 3487 - protein, 43 aa, Artificial Sequence
  Description of Artificial Sequence: Synthetic antibody
CISRHDSKNTAYLQMNSLKTEDTAVYYCIRGGSPDYFDYWGQG

SEQ ID NO: 3488 - DNA, 129 bp, Artificial Sequence
  Description of Artificial Sequence: Synthetic antibody
agcatttccagagatgattcaaagaacacggcgtatctgcagatgaacagcctgaaaaccgaagacacggccgtctattattgtatcagaggtgggagccctgactactttgactattggggccaggga

SEQ ID NO: 3489 - protein, 43 aa, Artificial Sequence
  Description of Artificial Sequence: Synthetic antibody
SISRDDSKNTAYLQMNSLKTEDTAVYYCIRGGSPDYFDYWGQG

SEQ ID NO: 3490 - DNA, 129 bp, Artificial Sequence
  Description of Artificial Sequence: Synthetic antibody
agcatttccagacatcattcaaagaacacggcgtatctgcagatgaacagcctgaaaaccgaagacacggccgtctattattgtatcagaggtgggagccctgactactttgactattggggccaggga

SEQ ID NO: 3491 - protein, 43 aa, Artificial Sequence
  Description of Artificial Sequence: Synthetic antibody
SISRHHSKNTAYLQMNSLKTEDTAVYYCIRGGSPDYFDYWGQG

SEQ ID NO: 3492 - DNA, 129 bp, Artificial Sequence
  Description of Artificial Sequence: Synthetic antibody
accatttccagacatgattcaaagaacacggcgtatctgcagatgaacagcctgaaaaccgaagacacggccgtctattattgtatcagaggtgggagccctgactactttgactattggggccaggga

SEQ ID NO: 3493 - protein, 43 aa, Artificial Sequence
  Description of Artificial Sequence: Synthetic antibody
TISRHDSKNTAYLQMNSLKTEDTAVYYCIRGGSPDYFDYWGQG

SEQ ID NO: 3494 - protein, 13 aa, Artificial Sequence
  Description of Artificial Sequence: Synthetic antibody
CATLWFGESNDYW

SEQ ID NO: 3495 - DNA, 129 bp, Artificial Sequence
  Description of Artificial Sequence: Synthetic antibody
accatctccatatataattccaagaacacgctgtatctgcaaatgaacagcctgagagccgaggacacggccgtatattactgtgcgactctatggttcggggagtcgaatgactactggggccaggga

SEQ ID NO: 3496 - protein, 43 aa, Artificial Sequence
  Description of Artificial Sequence: Synthetic antibody
TISIYNSKNTLYLQMNSLRAEDTAVYYCATLWFGESNDYWGQG

SEQ ID NO: 3497 - DNA, 129 bp, Artificial Sequence
  Description of Artificial Sequence: Synthetic antibody
accatctccatacataattccaagaacacgctgtatctgcaaatgaacagcctgagagccgaggacacggccgtatattactgtgcgactctatggttcggggagtcgaatgactactggggccaggga

SEQ ID NO: 3498 - protein, 43 aa, Artificial Sequence
  Description of Artificial Sequence: Synthetic antibody
TISIHNSKNTLYLQMNSLRAEDTAVYYCATLWFGESNDYWGQG

SEQ ID NO: 3499 - DNA, 129 bp, Artificial Sequence
  Description of Artificial Sequence: Synthetic antibody
accatctccagagataattccaagaacacgctgtatctgcaaatgaacagcctgagagccgaggacacggccgtatattactgtgcgactctatggttcggggagtcgaatgactactggggccaggga

SEQ ID NO: 3500 - protein, 43 aa, Artificial Sequence
  Description of Artificial Sequence: Synthetic antibody
TISRDNSKNTLYLQMNSLRAEDTAVYYCATLWFGESNDYWGQG

SEQ ID NO: 3501 - DNA, 129 bp, Artificial Sequence
  Description of Artificial Sequence: Synthetic antibody
aacatctccatatataattccaagaacacgctgtatctgcaaatgaacagcctgagagccgaggacacggccgtatattactgtgcgactctatggttcggggagtcgaatgactactggggccaggga

SEQ ID NO: 3502 - protein, 43 aa, Artificial Sequence
  Description of Artificial Sequence: Synthetic antibody
NISIYNSKNTLYLQMNSLRAEDTAVYYCATLWFGESNDYWGQG

SEQ ID NO: 3503 - DNA, 129 bp, Artificial Sequence
  Description of Artificial Sequence: Synthetic antibody
aacatctccagatataattccaagaacacgctgtatctgcaaatgaacagcctgagagccgaggacacggccgtatattactgtgcgactctatggttcggggagtcgaatgactactggggccaggga

SEQ ID NO: 3504 - protein, 43 aa, Artificial Sequence
  Description of Artificial Sequence: Synthetic antibody
NISRYNSKNTLYLQMNSLRAEDTAVYYCATLWFGESNDYWGQG

SEQ ID NO: 3505 - protein, 24 aa, Artificial Sequence
  Description of Artificial Sequence: Synthetic antibody
CAKDRSDPPWIFGVVMGYYGMDVW

SEQ ID NO: 3506 - DNA, 129 bp, Artificial Sequence
  Description of Artificial Sequence: Synthetic antibody
tttctgaaaatgaacagcctgagagccgaggacacggccgtatattactgtgcgaaagatcggagtgatcccccttggatttttggagtggttatgggctactacggtatggacgtctggggccaaggg

SEQ ID NO: 3507 - protein, 43 aa, Artificial Sequence
  Description of Artificial Sequence: Synthetic antibody
FLKMNSLRAEDTAVYYCAKDRSDPPWIFGVVMGYYGMDVWGQG

SEQ ID NO: 3508 - DNA, 129 bp, Artificial Sequence
  Description of Artificial Sequence: Synthetic antibody
tttatgcaaatgaacagcctgagagccgaggacacggccgtatattactgtgcgaaagatcggagtgatcccccttggatttttggagtggttatgggctactacggtatggacgtctggggccaaggg

SEQ ID NO: 3509 - protein, 43 aa, Artificial Sequence
  Description of Artificial Sequence: Synthetic antibody
FMQMNSLRAEDTAVYYCAKDRSDPPWIFGVVMGYYGMDVWGQG

SEQ ID NO: 3510 - DNA, 129 bp, Artificial Sequence
  Description of Artificial Sequence: Synthetic antibody
tatctgcaaatgaacagcctgagagccgaggacacggccgtatattactgtgcgaaagatcggagtgatcccccttggatttttggagtggttatgggctactacggtatggacgtctggggccaaggg

SEQ ID NO: 3511 - protein, 43 aa, Artificial Sequence
  Description of Artificial Sequence: Synthetic antibody
YLQMNSLRAEDTAVYYCAKDRSDPPWIFGVVMGYYGMDVWGQG

SEQ ID NO: 3512 - DNA, 129 bp, Artificial Sequence
  Description of Artificial Sequence: Synthetic antibody
tatctgaaaatcaacagcctgagagccgaggacacggccgtatattactgtgcgaaagatcggagtgatcccccttggatttttggagtggttatgggctactacggtatggacgtctggggccaaggg

SEQ ID NO: 3513 - protein, 43 aa, Artificial Sequence
  Description of Artificial Sequence: Synthetic antibody
YLKINSLRAEDTAVYYCAKDRSDPPWIFGVVMGYYGMDVWGQG

SEQ ID NO: 3514 - DNA, 129 bp, Artificial Sequence
  Description of Artificial Sequence: Synthetic antibody
tatatgaaaatgaacagcctgagagccgaggacacggccgtatattactgtgcgaaagatcggagtgatcccccttggatttttggagtggttatgggctactacggtatggacgtctggggccaaggg

SEQ ID NO: 3515 - protein, 43 aa, Artificial Sequence
  Description of Artificial Sequence: Synthetic antibody
YMKMNSLRAEDTAVYYCAKDRSDPPWIFGVVMGYYGMDVWGQG

SEQ ID NO: 3516 - protein, 11 aa, Artificial Sequence
  Description of Artificial Sequence: Synthetic antibody
CARGGGEFDCW

SEQ ID NO: 3517 - DNA, 129 bp, Artificial Sequence
  Description of Artificial Sequence: Synthetic antibody
cggttcaccatctccagagacaaatccaagaacacgctgtttctgcaaatggacagcctgagagccgaggacacggccatatatttctgtgcgagggggggtggtgagtttgactgctggggccaggga

SEQ ID NO: 3518 - protein, 43 aa, Artificial Sequence
  Description of Artificial Sequence: Synthetic antibody
RFTISRDKSKNTLFLQMDSLRAEDTAIYFCARGGGEFDCWGQG

SEQ ID NO: 3519 - DNA, 129 bp, Artificial Sequence
  Description of Artificial Sequence: Synthetic antibody
cggttcaccatctccagacacaaatccaagaacacgctgtttctgcaaatggacagcctgagagccgaggacacggccatatatttctgtgcgagggggggtggtgagtttgactgctggggccaggga

SEQ ID NO: 3520 - protein, 43 aa, Artificial Sequence
  Description of Artificial Sequence: Synthetic antibody
RFTISRHKSKNTLFLQMDSLRAEDTAIYFCARGGGEFDCWGQG

SEQ ID NO: 3521 - DNA, 129 bp, Artificial Sequence
  Description of Artificial Sequence: Synthetic antibody
cggttcaccatctccagacacaaaaccaagaacacgctgtttctgcaaatggacagcctgagagccgaggacacggccatatatttctgtgcgagggggggtggtgagtttgactgctggggccaggga

SEQ ID NO: 3522 - protein, 43 aa, Artificial Sequence
  Description of Artificial Sequence: Synthetic antibody
RFTISRHKTKNTLFLQMDSLRAEDTAIYFCARGGGEFDCWGQG

SEQ ID NO: 3523 - DNA, 129 bp, Artificial Sequence
  Description of Artificial Sequence: Synthetic antibody
cggttcaccatctccacagacaaatccaagaacacgctgtttctgcaaatggacagcctgagagccgaggacacggccatatatttctgtgcgagggggggtggtgagtttgactgctggggccaggga

SEQ ID NO: 3524 - protein, 43 aa, Artificial Sequence
  Description of Artificial Sequence: Synthetic antibody
RFTISTDKSKNTLFLQMDSLRAEDTAIYFCARGGGEFDCWGQG

SEQ ID NO: 3525 - DNA, 129 bp, Artificial Sequence
  Description of Artificial Sequence: Synthetic antibody
cggatcaccatctccagacacaaatccaagaacacgctgtttctgcaaatggacagcctgagagccgaggacacggccatatatttctgtgcgagggggggtggtgagtttgactgctggggccaggga

SEQ ID NO: 3526 - protein, 43 aa, Artificial Sequence
  Description of Artificial Sequence: Synthetic antibody
RITISRHKSKNTLFLQMDSLRAEDTAIYFCARGGGEFDCWGQG

SEQ ID NO: 3527 - protein, 16 aa, Artificial Sequence
  Description of Artificial Sequence: Synthetic antibody
CAREGGAPSYNWFDPW

SEQ ID NO: 3528 - DNA, 129 bp, Artificial Sequence
  Description of Artificial Sequence: Synthetic antibody
tggaacacctccataagcacagcctacatggagctgagcagcctgagatctgaggacacggccgtgtattactgtgcgagagaggggggggccccctcgtacaactggttcgacccctggggccaggga

SEQ ID NO: 3529 - protein, 43 aa, Artificial Sequence
  Description of Artificial Sequence: Synthetic antibody
WNTSISTAYMELSSLRSEDTAVYYCAREGGAPSYNWFDPWGQG

SEQ ID NO: 3530 - DNA, 129 bp, Artificial Sequence
  Description of Artificial Sequence: Synthetic antibody
agtaacacctccataagcacagcctacatggagctgagcagcctgagatctgaggacacggccgtgtattactgtgcgagagaggggggggccccctcgtacaactggttcgacccctggggccaggga

SEQ ID NO: 3531 - protein, 43 aa, Artificial Sequence
  Description of Artificial Sequence: Synthetic antibody
SNTSISTAYMELSSLRSEDTAVYYCAREGGAPSYNWFDPWGQG

SEQ ID NO: 3532 - DNA, 129 bp, Artificial Sequence
  Description of Artificial Sequence: Synthetic antibody
aggaacacctccatacgcacagcctacatggagctgagcagcctgagatctgaggacacggccgtgtattactgtgcgagagaggggggggccccctcgtacaactggttcgacccctggggccaggga

SEQ ID NO: 3533 - protein, 43 aa, Artificial Sequence
  Description of Artificial Sequence: Synthetic antibody
RNTSIRTAYMELSSLRSEDTAVYYCAREGGAPSYNWFDPWGQG

SEQ ID NO: 3534 - DNA, 129 bp, Artificial Sequence
  Description of Artificial Sequence: Synthetic antibody
aggaacacctccataagcacagcctacatggagctgagcagcctgagatctgaggacacggccgtgtattactgtgcgagagaggggggggccccctcgtacaactggttcgacccctggggccaggga

SEQ ID NO: 3535 - protein, 43 aa, Artificial Sequence
  Description of Artificial Sequence: Synthetic antibody
RNTSISTAYMELSSLRSEDTAVYYCAREGGAPSYNWFDPWGQG

SEQ ID NO: 3536 - DNA, 129 bp, Artificial Sequence
  Description of Artificial Sequence: Synthetic antibody
aggaacacctccataaccacagcctacatggagctgagcagcctgagatctgaggacacggccgtgtattactgtgcgagagaggggggggccccctcgtacaactggttcgacccctggggccaggga

SEQ ID NO: 3537 - protein, 43 aa, Artificial Sequence
  Description of Artificial Sequence: Synthetic antibody
RNTSITTAYMELSSLRSEDTAVYYCAREGGAPSYNWFDPWGQG

SEQ ID NO: 3538 - protein, 14 aa, Artificial Sequence
  Description of Artificial Sequence: Synthetic antibody
CAKTYDYGDYVGYW

SEQ ID NO: 3539 - DNA, 129 bp, Artificial Sequence
  Description of Artificial Sequence: Synthetic antibody
atctccatatataattccaagaacacgctgtatctgcaaatgaacagcctgagagccgaggacacggccgtatattactgtgcgaaaacctatgactacggtgactacgtgggctactggggccaggga

SEQ ID NO: 3540 - protein, 43 aa, Artificial Sequence
  Description of Artificial Sequence: Synthetic antibody
ISIYNSKNTLYLQMNSLRAEDTAVYYCAKTYDYGDYVGYWGQG

SEQ ID NO: 3541 - DNA, 129 bp, Artificial Sequence
  Description of Artificial Sequence: Synthetic antibody
atctccatacataattccaagaacacgctgtatctgcaaatgaacagcctgagagccgaggacacggccgtatattactgtgcgaaaacctatgactacggtgactacgtgggctactggggccaggga

SEQ ID NO: 3542 - protein, 43 aa, Artificial Sequence
  Description of Artificial Sequence: Synthetic antibody
ISIHNSKNTLYLQMNSLRAEDTAVYYCAKTYDYGDYVGYWGQG

SEQ ID NO: 3543 - DNA, 129 bp, Artificial Sequence
  Description of Artificial Sequence: Synthetic antibody
atctccagatataattccaacaacacgctgtatctgcaaatgaacagcctgagagccgaggacacggccgtatattactgtgcgaaaacctatgactacggtgactacgtgggctactggggccaggga

SEQ ID NO: 3544 - protein, 43 aa, Artificial Sequence
  Description of Artificial Sequence: Synthetic antibody
ISRYNSNNTLYLQMNSLRAEDTAVYYCAKTYDYGDYVGYWGQG

SEQ ID NO: 3545 - DNA, 129 bp, Artificial Sequence
  Description of Artificial Sequence: Synthetic antibody
atctccagagataattccaagaacacgctgtatctgcaaatgaacagcctgagagccgaggacacggccgtatattactgtgcgaaaacctatgactacggtgactacgtgggctactggggccaggga

SEQ ID NO: 3546 - protein, 43 aa, Artificial Sequence
  Description of Artificial Sequence: Synthetic antibody
ISRDNSKNTLYLQMNSLRAEDTAVYYCAKTYDYGDYVGYWGQG

SEQ ID NO: 3547 - DNA, 129 bp, Artificial Sequence
  Description of Artificial Sequence: Synthetic antibody
atctccagacataattccaacaacacgctgtatctgcaaatgaacagcctgagagccgaggacacggccgtatattactgtgcgaaaacctatgactacggtgactacgtgggctactggggccaggga

SEQ ID NO: 3548 - protein, 43 aa, Artificial Sequence
  Description of Artificial Sequence: Synthetic antibody
ISRHNSNNTLYLQMNSLRAEDTAVYYCAKTYDYGDYVGYWGQG

SEQ ID NO: 3549 - protein, 14 aa, Artificial Sequence
  Description of Artificial Sequence: Synthetic antibody
CAKDLWRGGLFDYW

SEQ ID NO: 3550 - DNA, 129 bp, Artificial Sequence
  Description of Artificial Sequence: Synthetic antibody
atctccatagataattccaagaacacgctgtatctgcaaatgaacagcctgagagccgaggacacggccgtatattactgtgcgaaagatctttggagggggggtctctttgactactggggccaggga

SEQ ID NO: 3551 - protein, 43 aa, Artificial Sequence
  Description of Artificial Sequence: Synthetic antibody
ISIDNSKNTLYLQMNSLRAEDTAVYYCAKDLWRGGLFDYWGQG

SEQ ID NO: 3552 - DNA, 129 bp, Artificial Sequence
  Description of Artificial Sequence: Synthetic antibody
atctccatacataattccaagaacacgctgtatctgcaaatgaacagcctgagagccgaggacacggccgtatattactgtgcgaaagatctttggagggggggtctctttgactactggggccaggga

SEQ ID NO: 3553 - protein, 43 aa, Artificial Sequence
  Description of Artificial Sequence: Synthetic antibody
ISIHNSKNTLYLQMNSLRAEDTAVYYCAKDLWRGGLFDYWGQG

SEQ ID NO: 3554 - DNA, 129 bp, Artificial Sequence
  Description of Artificial Sequence: Synthetic antibody
atctccagatataattccaagaacacgctgtatctgcaaatgaacagcctgagagccgaggacacggccgtatattactgtgcgaaagatctttggagggggggtctctttgactactggggccaggga

SEQ ID NO: 3555 - protein, 43 aa, Artificial Sequence
  Description of Artificial Sequence: Synthetic antibody
ISRYNSKNTLYLQMNSLRAEDTAVYYCAKDLWRGGLFDYWGQG

SEQ ID NO: 3556 - DNA, 129 bp, Artificial Sequence
  Description of Artificial Sequence: Synthetic antibody
atctccagagataattccaagaacacgctgtatctgcaaatgaacagcctgagagccgaggacacggccgtatattactgtgcgaaagatctttggagggggggtctctttgactactggggccaggga

SEQ ID NO: 3557 - protein, 43 aa, Artificial Sequence
  Description of Artificial Sequence: Synthetic antibody
ISRDNSKNTLYLQMNSLRAEDTAVYYCAKDLWRGGLFDYWGQG

SEQ ID NO: 3558 - DNA, 129 bp, Artificial Sequence
  Description of Artificial Sequence: Synthetic antibody
atctccagacataattccaagaacacgctgtatctgcaaatgaacagcctgagagccgaggacacggccgtatattactgtgcgaaagatctttggagggggggtctctttgactactggggccaggga

SEQ ID NO: 3559 - protein, 43 aa, Artificial Sequence
  Description of Artificial Sequence: Synthetic antibody
ISRHNSKNTLYLQMNSLRAEDTAVYYCAKDLWRGGLFDYWGQG

SEQ ID NO: 3560 - protein, 13 aa, Artificial Sequence
  Description of Artificial Sequence: Synthetic antibody
CGGSYYYYGMDVW

SEQ ID NO: 3561 - DNA, 129 bp, Artificial Sequence
  Description of Artificial Sequence: Synthetic antibody
accatctccatagataattccaagaacacgctgtatctgcaaatgaacagcctgagagccgaggacacggccgtatattactgtggggggtcatactactactacggtatggacgtctggggccaaggg

SEQ ID NO: 3562 - protein, 43 aa, Artificial Sequence
  Description of Artificial Sequence: Synthetic antibody
TISIDNSKNTLYLQMNSLRAEDTAVYYCGGSYYYYGMDVWGQG

SEQ ID NO: 3563 - DNA, 129 bp, Artificial Sequence
  Description of Artificial Sequence: Synthetic antibody
accatctccagatataattccaagaacacgctgtatctgcaaatgaacagcctgagagccgaggacacggccgtatattactgtggggggtcatactactactacggtatggacgtctggggccaaggg

SEQ ID NO: 3564 - protein, 43 aa, Artificial Sequence
  Description of Artificial Sequence: Synthetic antibody
TISRYNSKNTLYLQMNSLRAEDTAVYYCGGSYYYYGMDVWGQG

SEQ ID NO: 3565 - DNA, 129 bp, Artificial Sequence
  Description of Artificial Sequence: Synthetic antibody
accatctccagagataattccaagaacacgctgtatctgcaaatgaacagcctgagagccgaggacacggccgtatattactgtggggggtcatactactactacggtatggacgtctggggccaaggg

SEQ ID NO: 3566 - protein, 43 aa, Artificial Sequence
  Description of Artificial Sequence: Synthetic antibody
TISRDNSKNTLYLQMNSLRAEDTAVYYCGGSYYYYGMDVWGQG

SEQ ID NO: 3567 - DNA, 129 bp, Artificial Sequence
  Description of Artificial Sequence: Synthetic antibody
accatctccagagataattccaagaacacgctgtatctgcaaatcaacagcctgagagccgaggacacggccgtatattactgtggggggtcatactactactacggtatggacgtctggggccaaggg

SEQ ID NO: 3568 - protein, 43 aa, Artificial Sequence
  Description of Artificial Sequence: Synthetic antibody
TISRDNSKNTLYLQINSLRAEDTAVYYCGGSYYYYGMDVWGQG

SEQ ID NO: 3569 - DNA, 129 bp, Artificial Sequence
  Description of Artificial Sequence: Synthetic antibody
accatctccagacataattccaagaacacgctgtatctgcaaatgaacagcctgagagccgaggacacggccgtatattactgtggggggtcatactactactacggtatggacgtctggggccaaggg

SEQ ID NO: 3570 - protein, 43 aa, Artificial Sequence
  Description of Artificial Sequence: Synthetic antibody
TISRHNSKNTLYLQMNSLRAEDTAVYYCGGSYYYYGMDVWGQG

SEQ ID NO: 3571 - protein, 21 aa, Artificial Sequence
  Description of Artificial Sequence: Synthetic antibody
CARDPNAEGGAVAGPHGMDVW

SEQ ID NO: 3572 - DNA, 129 bp, Artificial Sequence
  Description of Artificial Sequence: Synthetic antibody
tgcacagcctacttggagctgagcagcctgagatctgaggacacggccgtgtattactgtgcgagagatcccaacgccgaagggggagcagtggctggtccccacggtatggacgtctggggccaaggg

SEQ ID NO: 3573 - protein, 43 aa, Artificial Sequence
  Description of Artificial Sequence: Synthetic antibody
CTAYLELSSLRSEDTAVYYCARDPNAEGGAVAGPHGMDVWGQG

SEQ ID NO: 3574 - DNA, 129 bp, Artificial Sequence
  Description of Artificial Sequence: Synthetic antibody
tgcacagcctacatggagctgagcagcctgagatctgaggacacggccgtgtattactgtgcgagagatcccaacgccgaagggggagcagtggctggtccccacggtatggacgtctggggccaaggg

SEQ ID NO: 3575 - protein, 43 aa, Artificial Sequence
  Description of Artificial Sequence: Synthetic antibody
CTAYMELSSLRSEDTAVYYCARDPNAEGGAVAGPHGMDVWGQG

SEQ ID NO: 3576 - DNA, 129 bp, Artificial Sequence
  Description of Artificial Sequence: Synthetic antibody
agcacagcctacatggagctgagcagcctgagatctgaggacacggccgtgtattactgtgcgagagatcccaacgccgaagggggagcagtggctggtccccacggtatggacgtctggggccaaggg

SEQ ID NO: 3577 - protein, 43 aa, Artificial Sequence
  Description of Artificial Sequence: Synthetic antibody
STAYMELSSLRSEDTAVYYCARDPNAEGGAVAGPHGMDVWGQG

SEQ ID NO: 3578 - DNA, 129 bp, Artificial Sequence
  Description of Artificial Sequence: Synthetic antibody
agcacagcctacatggagctgagcagcctgagatctgaggacacggccatgtattactgtgcgagagatcccaacgccgaagggggagcagtggctggtccccacggtatggacgtctggggccaaggg

SEQ ID NO: 3579 - protein, 43 aa, Artificial Sequence
  Description of Artificial Sequence: Synthetic antibody
STAYMELSSLRSEDTAMYYCARDPNAEGGAVAGPHGMDVWGQG

SEQ ID NO: 3580 - DNA, 129 bp, Artificial Sequence
  Description of Artificial Sequence: Synthetic antibody
agcacagcctacatggagctgagcagcctgagatctgaggacacagccgtgtattactgtgcgagagatcccaacgccgaagggggagcagtggctggtccccacggtatggacgtctggggccaaggg

SEQ ID NO: 3581 - protein, 22 aa, Artificial Sequence
  Description of Artificial Sequence: Synthetic antibody
CAKADSYYDILTGFWSGSYDYW

SEQ ID NO: 3582 - DNA, 129 bp, Artificial Sequence
  Description of Artificial Sequence: Synthetic antibody
tcgatgtatctgcaaatgaacagcctgagagccgaggacacggccgtatattactgtgcgaaagctgactcgtattacgatattttgactggtttttggtccggaagttatgactactggggccaggga

SEQ ID NO: 3583 - protein, 43 aa, Artificial Sequence
  Description of Artificial Sequence: Synthetic antibody
SMYLQMNSLRAEDTAVYYCAKADSYYDILTGFWSGSYDYWGQG

SEQ ID NO: 3584 - DNA, 129 bp, Artificial Sequence
  Description of Artificial Sequence: Synthetic antibody
acgctgtatctgcaaatgaacagcctgagagccgaggacacggccgtatattactgtgcgaaagctgactcgtattacgatattttgactggtttttggtccggaagttatgactactggggccaggga

SEQ ID NO: 3585 - protein, 43 aa, Artificial Sequence
  Description of Artificial Sequence: Synthetic antibody
TLYLQMNSLRAEDTAVYYCAKADSYYDILTGFWSGSYDYWGQG

SEQ ID NO: 3586 - DNA, 129 bp, Artificial Sequence
  Description of Artificial Sequence: Synthetic antibody
acgatgtatctgcaaatgaacagcctgagagccgagtacacggccgtatattactgtgcgaaagctgactcgtattacgatattttgactggtttttggtccggaagttatgactactggggccaggga

SEQ ID NO: 3587 - protein, 43 aa, Artificial Sequence
  Description of Artificial Sequence: Synthetic antibody
TMYLQMNSLRAEYTAVYYCAKADSYYDILTGFWSGSYDYWGQG

SEQ ID NO: 3588 - DNA, 129 bp, Artificial Sequence
  Description of Artificial Sequence: Synthetic antibody
acgatgtatctgcaaatcaacagcctgagagccgaggacacggccgtatattactgtgcgaaagctgactcgtattacgatattttgactggtttttggtccggaagttatgactactggggccaggga

SEQ ID NO: 3589 - protein, 43 aa, Artificial Sequence
  Description of Artificial Sequence: Synthetic antibody
TMYLQINSLRAEDTAVYYCAKADSYYDILTGFWSGSYDYWGQG

SEQ ID NO: 3590 - DNA, 129 bp, Artificial Sequence
  Description of Artificial Sequence: Synthetic antibody
acgatgtatctccaaatgaacagcctgagagccgaggacacggccgtatattactgtgcgaaagctgactcgtattacgatattttgactggtttttggtccggaagttatgactactggggccaggga

SEQ ID NO: 3591 - protein, 43 aa, Artificial Sequence
  Description of Artificial Sequence: Synthetic antibody
TMYLQMNSLRAEDTAVYYCAKADSYYDILTGFWSGSYDYWGQG

SEQ ID NO: 3592 - protein, 15 aa, Artificial Sequence
  Description of Artificial Sequence: Synthetic antibody
CAKGLSAYISFFDDW

SEQ ID NO: 3593 - DNA, 129 bp, Artificial Sequence
  Description of Artificial Sequence: Synthetic antibody
tccagttataattcccaaaacactctgtatctgcaaatgaacagcctgagagccgaagacacggccgtatattactgtgcgaaagggctaagtgcctacatttcgttctttgatgactggggccaggga

SEQ ID NO: 3594 - protein, 43 aa, Artificial Sequence
  Description of Artificial Sequence: Synthetic antibody
SSYNSQNTLYLQMNSLRAEDTAVYYCAKGLSAYISFFDDWGQG

SEQ ID NO: 3595 - DNA, 129 bp, Artificial Sequence
  Description of Artificial Sequence: Synthetic antibody
tccagtgataattccgaaaacactctgtatctgcaaatgaacagcctgagagccgaagacacggccgtatattactgtgcgaaagggctaagtgcctacatttcgttctttgatgactggggccaggga

SEQ ID NO: 3596 - protein, 43 aa, Artificial Sequence
  Description of Artificial Sequence: Synthetic antibody
SSDNSENTLYLQMNSLRAEDTAVYYCAKGLSAYISFFDDWGQG

SEQ ID NO: 3597 - DNA, 129 bp, Artificial Sequence
  Description of Artificial Sequence: Synthetic antibody
tccagtgataattcccaaaacactctgtatctgcaaatgaaccgcctgagagccgaagacacggccgtatattactgtgcgaaagggctaagtgcctacatttcgttctttgatgactggggccaggga

SEQ ID NO: 3598 - protein, 43 aa, Artificial Sequence
  Description of Artificial Sequence: Synthetic antibody
SSDNSQNTLYLQMNRLRAEDTAVYYCAKGLSAYISFFDDWGQG

SEQ ID NO: 3599 - DNA, 129 bp, Artificial Sequence
  Description of Artificial Sequence: Synthetic antibody
tccagtgataattcccaaaacactctgtatctgcaaatgaacagcctgagagccgaagacacggccgtatattactgtgcgaaagggctaagtgcctacatttcgttctttgatgactggggccaggga

SEQ ID NO: 3600 - protein, 43 aa, Artificial Sequence
  Description of Artificial Sequence: Synthetic antibody
SSDNSQNTLYLQMNSLRAEDTAVYYCAKGLSAYISFFDDWGQG

SEQ ID NO: 3601 - DNA, 129 bp, Artificial Sequence
  Description of Artificial Sequence: Synthetic antibody
tccagtgataattcccaaaacactctgtatctgcaaatcaacagcctgagagccgaagacacggccgtatattactgtgcgaaagggctaagtgcctacatttcgttctttgatgactggggccaggga

SEQ ID NO: 3602 - protein, 43 aa, Artificial Sequence
  Description of Artificial Sequence: Synthetic antibody
SSDNSQNTLYLQINSLRAEDTAVYYCAKGLSAYISFFDDWGQG

SEQ ID NO: 3603 - protein, 13 aa, Artificial Sequence
  Description of Artificial Sequence: Synthetic antibody
CARGRGNENFDYW

SEQ ID NO: 3604 - DNA, 129 bp, Artificial Sequence
  Description of Artificial Sequence: Synthetic antibody
accatctccatagaaaatgccaagaactccttgtatcttcaaatgaacagcctgagagccggtgacacggctgtgtattactgtgcaagagggaggggaaacgagaactttgactactggggccaggga

SEQ ID NO: 3605 - protein, 43 aa, Artificial Sequence
  Description of Artificial Sequence: Synthetic antibody
TISIENAKNSLYLQMNSLRAGDTAVYYCARGRGNENFDYWGQG

SEQ ID NO: 3606 - DNA, 129 bp, Artificial Sequence
  Description of Artificial Sequence: Synthetic antibody
accatctccatacaaaatgccaagaactccttgtatcttcaaatgaacagcctgagagccggggacacggctgtgtattactgtgcaagagggaggggaaacgagaactttgactactggggccaggga

SEQ ID NO: 3607 - protein, 43 aa, Artificial Sequence
  Description of Artificial Sequence: Synthetic antibody
TISIQNAKNSLYLQMNSLRAGDTAVYYCARGRGNENFDYWGQG

SEQ ID NO: 3608 - DNA, 129 bp, Artificial Sequence
  Description of Artificial Sequence: Synthetic antibody
accatctccagagaaaatgccaagaactccttgtatcttcaaatgaacagcctgagagccggggacacggctgtgtattactgtgcaagagggaggggaaacgagaactttgactactggggccaggga

SEQ ID NO: 3609 - protein, 43 aa, Artificial Sequence
  Description of Artificial Sequence: Synthetic antibody
TISRENAKNSLYLQMNSLRAGDTAVYYCARGRGNENFDYWGQG

SEQ ID NO: 3610 - DNA, 129 bp, Artificial Sequence
  Description of Artificial Sequence: Synthetic antibody
aacatctccatagaaaatgccaagaactccttgtatcttcaaatgaacagcctgagagccggggacacggctgtgtattactgtgcaagagggaggggaaacgagaactttgactactggggccaggga

SEQ ID NO: 3611 - protein, 43 aa, Artificial Sequence
  Description of Artificial Sequence: Synthetic antibody
NISIENAKNSLYLQMNSLRAGDTAVYYCARGRGNENFDYWGQG

SEQ ID NO: 3612 - DNA, 129 bp, Artificial Sequence
  Description of Artificial Sequence: Synthetic antibody
aacatctccagagaaaatgccaagaactccttgtatcttcaaatgaacagcctgagagccggtgacacggctgtgtattactgtgcaagagggaggggaaacgagaactttgactactggggccaggga

SEQ ID NO: 3613 - protein, 43 aa, Artificial Sequence
  Description of Artificial Sequence: Synthetic antibody
NISRENAKNSLYLQMNSLRAGDTAVYYCARGRGNENFDYWGQG

SEQ ID NO: 3614 - protein, 13 aa, Artificial Sequence
  Description of Artificial Sequence: Synthetic antibody
CTREFWGFGEDYW

SEQ ID NO: 3615 - DNA, 129 bp, Artificial Sequence
  Description of Artificial Sequence: Synthetic antibody
accatctcaagagattattccaaaagcatcgcctatctgcaaatcaacagccttaaaaccgagcacacagccgtgtattactgtactagagagttctgggggttcggggaagactactggggccaggga

SEQ ID NO: 3616 - protein, 43 aa, Artificial Sequence
  Description of Artificial Sequence: Synthetic antibody
TISRDYSKSIAYLQINSLKTEHTAVYYCTREFWGFGEDYWGQG

SEQ ID NO: 3617 - DNA, 129 bp, Artificial Sequence
  Description of Artificial Sequence: Synthetic antibody
accatctcaagagatgattccaaaagcatcgcctatctgcaaatgaacagccttaaaaccgaggacacagccgtgtattactgtactagagagttctgggggttcggggaagactactggggccaggga

SEQ ID NO: 3618 - protein, 43 aa, Artificial Sequence
  Description of Artificial Sequence: Synthetic antibody
TISRDDSKSIAYLQMNSLKTEDTAVYYCTREFWGFGEDYWGQG

SEQ ID NO: 3619 - DNA, 129 bp, Artificial Sequence
  Description of Artificial Sequence: Synthetic antibody
accatctcaagagatgattccaaaagcatcgcctatctgcaaatgaacagcctgaaaaccgaggacacagccgtgtattactgtactagagagttctgggggttcggggaagactactggggccaggga

SEQ ID NO: 3620 - DNA, 129 bp, Artificial Sequence
  Description of Artificial Sequence: Synthetic antibody
accatctcaagagatgattccaaaagcatcgcctatctgcaaatgaacagcctgaaaaccgaggacacagccgtgtattactgtactagagagttctgggggttcggagaagactactggggccaggga

SEQ ID NO: 3621 - DNA, 129 bp, Artificial Sequence
  Description of Artificial Sequence: Synthetic antibody
acaatctcaagagatgattccaaaagcatcgcctatctgcaaatgaacagcctgaaaaccgaggacacagccgtgtattactgtactagagagttctgggggttcggggaagactactggggccaggga

SEQ ID NO: 3622 - protein, 15 aa, Artificial Sequence
  Description of Artificial Sequence: Synthetic antibody
CTVTPPYQYYAMDVW

SEQ ID NO: 3623 - DNA, 129 bp, Artificial Sequence
  Description of Artificial Sequence: Synthetic antibody
tccagagattattcaaacaacacggtgtatctgcaaatgaacagcctgaaaaccgaggacacggccgtgtatttctgtactgttactcctccttaccagtattacgctatggacgtctggggccaaggg

SEQ ID NO: 3624 - protein, 43 aa, Artificial Sequence
  Description of Artificial Sequence: Synthetic antibody
SRDYSNNTVYLQMNSLKTEDTAVYFCTVTPPYQYYAMDVWGQG

SEQ ID NO: 3625 - DNA, 129 bp, Artificial Sequence
  Description of Artificial Sequence: Synthetic antibody
tccagagatgattcaaagaacacggtgtatctgcaaatgaacagcctgaaaaccgaggacacggccgtgtatttctgtactgttactcctccttaccagtattacgctatggacgtctggggccaaggg

SEQ ID NO: 3626 - protein, 43 aa, Artificial Sequence
  Description of Artificial Sequence: Synthetic antibody
SRDDSKNTVYLQMNSLKTEDTAVYFCTVTPPYQYYAMDVWGQG

SEQ ID NO: 3627 - DNA, 129 bp, Artificial Sequence
  Description of Artificial Sequence: Synthetic antibody
tccagagatgattcaaacaacacggtgtatctgcaaatgaacagcctcaaaaccgaggacacggccgtgtatttctgtactgttactcctccttaccagtattacgctatggacgtctggggccaaggg

SEQ ID NO: 3628 - protein, 43 aa, Artificial Sequence
  Description of Artificial Sequence: Synthetic antibody
SRDDSNNTVYLQMNSLKTEDTAVYFCTVTPPYQYYAMDVWGQG

SEQ ID NO: 3629 - DNA, 129 bp, Artificial Sequence
  Description of Artificial Sequence: Synthetic antibody
tccagagatcattcaaacaacacggtgtatctgcaaatgaacagcctgaaaaccgaggacacggccgtgtatttctgtactgttactcctccttaccagtattacgctatggacgtctggggccaaggg

SEQ ID NO: 3630 - protein, 43 aa, Artificial Sequence
  Description of Artificial Sequence: Synthetic antibody
SRDHSNNTVYLQMNSLKTEDTAVYFCTVTPPYQYYAMDVWGQG

SEQ ID NO: 3631 - protein, 21 aa, Artificial Sequence
  Description of Artificial Sequence: Synthetic antibody
CAKHARFYSSSHTRDDAFDIW

SEQ ID NO: 3632 - DNA, 129 bp, Artificial Sequence
  Description of Artificial Sequence: Synthetic antibody
aacacgctgtttctgcaaatgaacagcctgagagccgaggacacggccgtatattactgtgcgaagcacgcccgtttctatagcagcagccacacccgcgatgatgcttttgatatctggggccaaggg

SEQ ID NO: 3633 - protein, 43 aa, Artificial Sequence
  Description of Artificial Sequence: Synthetic antibody
NTLFLQMNSLRAEDTAVYYCAKHARFYSSSHTRDDAFDIWGQG

SEQ ID NO: 3634 - DNA, 129 bp, Artificial Sequence
  Description of Artificial Sequence: Synthetic antibody
aacacgctgtatctgcaaatgaacagcctgagagccgaggacacggccgtatattactgtgcgaagcacgcccgtttctatagcagcagccacacccgcgatgatgcttttgatatctggggccaaggg

SEQ ID NO: 3635 - protein, 43 aa, Artificial Sequence
  Description of Artificial Sequence: Synthetic antibody
NTLYLQMNSLRAEDTAVYYCAKHARFYSSSHTRDDAFDIWGQG

SEQ ID NO: 3636 - DNA, 129 bp, Artificial Sequence
  Description of Artificial Sequence: Synthetic antibody
aacacgctgtatctgcaaatcaacagcctgagagccgaggacacggccgtatattactgtgcgaagcacgcccgtttctatagcagcagccacacccgcgatgatgcttttgatatctggggccaaggg

SEQ ID NO: 3637 - protein, 43 aa, Artificial Sequence
  Description of Artificial Sequence: Synthetic antibody
NTLYLQINSLRAEDTAVYYCAKHARFYSSSHTRDDAFDIWGQG

SEQ ID NO: 3638 - DNA, 129 bp, Artificial Sequence
  Description of Artificial Sequence: Synthetic antibody
aacacgctgtatctgaaaatgaacagcctgagagccgaggacacggccgtatattactgtgcgaagcacgcccgtttctatagcagcagccacacccgcgatgatgcttttgatatctggggccaaggg

SEQ ID NO: 3639 - protein, 43 aa, Artificial Sequence
  Description of Artificial Sequence: Synthetic antibody
NTLYLKMNSLRAEDTAVYYCAKHARFYSSSHTRDDAFDIWGQG

SEQ ID NO: 3640 - protein, 13 aa, Artificial Sequence
  Description of Artificial Sequence: Synthetic antibody
CARGDGQLVLPSW

SEQ ID NO: 3641 - DNA, 129 bp, Artificial Sequence
  Description of Artificial Sequence: Synthetic antibody
tgtcttctccttggacgccctgtcagcacggcatatctgcagatcagcagcctaaagactgaggacactgccgtgtattactgtgcgagaggggatgggcagctggtacttccgtcgtggggccaggga

SEQ ID NO: 3642 - protein, 43 aa, Artificial Sequence
  Description of Artificial Sequence: Synthetic antibody
CLLLGRPVSTAYLQISSLKTEDTAVYYCARGDGQLVLPSWGQG

SEQ ID NO: 3643 - DNA, 129 bp, Artificial Sequence
  Description of Artificial Sequence: Synthetic antibody
gtcttctccttggacgcctctgtcagcacggcatatctgcagatcagcagcctaaagactgaggacactgccgtgtattactgtgcgagaggggatgggcagctggtacttccgtcgtggggccaggga

SEQ ID NO: 3644 - protein, 43 aa, Artificial Sequence
  Description of Artificial Sequence: Synthetic antibody
VFSLDASVSTAYLQISSLKTEDTAVYYCARGDGQLVLPSWGQG

SEQ ID NO: 3645 - DNA, 129 bp, Artificial Sequence
  Description of Artificial Sequence: Synthetic antibody
gtcttctccttggacacctctgtcagcacggcatatctgcagatcagcagcctaaaggctgaggacactgccgtgtattactgtgcgagaggggatgggcagctggtacttccgtcgtggggccaggga

SEQ ID NO: 3646 - protein, 43 aa, Artificial Sequence
  Description of Artificial Sequence: Synthetic antibody
VFSLDTSVSTAYLQISSLKAEDTAVYYCARGDGQLVLPSWGQG

SEQ ID NO: 3647 - DNA, 129 bp, Artificial Sequence
  Description of Artificial Sequence: Synthetic antibody
gtcttctccttggacacctctgtcagcacggcatatctgcagatcagcagcctaaagactgaggacactgccgtgtattactgtgcgagaggggatgggcagctggtacttccgtcgtggggccaggga

SEQ ID NO: 3648 - protein, 43 aa, Artificial Sequence
  Description of Artificial Sequence: Synthetic antibody
VFSLDTSVSTAYLQISSLKTEDTAVYYCARGDGQLVLPSWGQG

SEQ ID NO: 3649 - protein, 14 aa, Artificial Sequence
  Description of Artificial Sequence: Synthetic antibody
CAKDRLGAAVPDYW

SEQ ID NO: 3650 - DNA, 129 bp, Artificial Sequence
  Description of Artificial Sequence: Synthetic antibody
atctccatatataattccaagaacacgctgtatctgcaaatgaacagcctgagagccgaggacacggccgtatattactgtgcgaaagataggttaggagcagctgtccctgactactggggccaggga

SEQ ID NO: 3651 - protein, 43 aa, Artificial Sequence
  Description of Artificial Sequence: Synthetic antibody
ISIYNSKNTLYLQMNSLRAEDTAVYYCAKDRLGAAVPDYWGQG

SEQ ID NO: 3652 - DNA, 129 bp, Artificial Sequence
  Description of Artificial Sequence: Synthetic antibody
atctccatacataattccaagaacacgctgtatctgcaaatgaacagcctgagagccgaggacacggccgtatattactgtgcgaaagataggttaggagcagctgtccctgactactggggccaggga

SEQ ID NO: 3653 - protein, 43 aa, Artificial Sequence
  Description of Artificial Sequence: Synthetic antibody
ISIHNSKNTLYLQMNSLRAEDTAVYYCAKDRLGAAVPDYWGQG

SEQ ID NO: 3654 - DNA, 129 bp, Artificial Sequence
  Description of Artificial Sequence: Synthetic antibody
atctccagatataattccaacaacacgctgtatctgcaaatgaacagcctgagagccgaggacacggccgtatattactgtgcgaaagataggttaggagcagctgtccctgactactggggccaggga

SEQ ID NO: 3655 - protein, 43 aa, Artificial Sequence
  Description of Artificial Sequence: Synthetic antibody
ISRYNSNNTLYLQMNSLRAEDTAVYYCAKDRLGAAVPDYWGQG

SEQ ID NO: 3656 - DNA, 129 bp, Artificial Sequence
  Description of Artificial Sequence: Synthetic antibody
atctccagagataattccaagaacacgctgtatctgcaaatgaacagcctgagagccgaggacacggccgtatattactgtgcgaaagataggttaggagcagctgtccctgactactggggccaggga

SEQ ID NO: 3657 - protein, 43 aa, Artificial Sequence
  Description of Artificial Sequence: Synthetic antibody
ISRDNSKNTLYLQMNSLRAEDTAVYYCAKDRLGAAVPDYWGQG

SEQ ID NO: 3658 - protein, 18 aa, Artificial Sequence
  Description of Artificial Sequence: Synthetic antibody
CRIVVVPAANYYYGMDVW

SEQ ID NO: 3659 - DNA, 129 bp, Artificial Sequence
  Description of Artificial Sequence: Synthetic antibody
tattcaaagaccacggcgtatctgcaaatgaacagcctgaaaaccgaggacacggccgtgtattactgtcgtattgtagtagtaccagctgcaaactactactacggtatggacgtctggggccaaggg

SEQ ID NO: 3660 - protein, 43 aa, Artificial Sequence
  Description of Artificial Sequence: Synthetic antibody
YSKTTAYLQMNSLKTEDTAVYYCRIVVVPAANYYYGMDVWGQG

SEQ ID NO: 3661 - DNA, 129 bp, Artificial Sequence
  Description of Artificial Sequence: Synthetic antibody
gtttcaaagaactcggcgtatctgcaaatgaacagcctgaaaaccgaggacacggccgtgtattactgtcgtattgtagtagtaccagctgcaaactactactacggtatggacgtctggggccaaggg

SEQ ID NO: 3662 - protein, 43 aa, Artificial Sequence
  Description of Artificial Sequence: Synthetic antibody
VSKNSAYLQMNSLKTEDTAVYYCRIVVVPAANYYYGMDVWGQG

SEQ ID NO: 3663 - DNA, 129 bp, Artificial Sequence
  Description of Artificial Sequence: Synthetic antibody
gattcaaagaacacggcgtatctgcaaatgaacagcctgaaaaccgaggacacggccgtgtattactgtcgtattgtagtagtaccagctgcaaactactactacggtatggacgtctggggccaaggg

SEQ ID NO: 3664 - protein, 43 aa, Artificial Sequence
  Description of Artificial Sequence: Synthetic antibody
DSKNTAYLQMNSLKTEDTAVYYCRIVVVPAANYYYGMDVWGQG

SEQ ID NO: 3665 - DNA, 129 bp, Artificial Sequence
  Description of Artificial Sequence: Synthetic antibody
attcaaagaaccacggcgtatctgcaaatgaacagcctgaaaaccgaggacacggccgtgtattactgtcgtattgtagtagtaccagctgcaaactactactacggtatggacgtctggggccaaggg

SEQ ID NO: 3666 - protein, 43 aa, Artificial Sequence
  Description of Artificial Sequence: Synthetic antibody
IQRTTAYLQMNSLKTEDTAVYYCRIVVVPAANYYYGMDVWGQG

SEQ ID NO: 3667 - protein, 16 aa, Artificial Sequence
  Description of Artificial Sequence: Synthetic antibody
CAKGPRPGGSWRFDYW

SEQ ID NO: 3668 - DNA, 129 bp, Artificial Sequence
  Description of Artificial Sequence: Synthetic antibody
atagataattccaagaacacgctgtatctgcaaatgaacagcctgagagccgaggacacggccgtatattactgtgcgaaaggcccgcgacctgggggcagctggcgctttgactactggggccaggga

SEQ ID NO: 3669 - protein, 43 aa, Artificial Sequence
  Description of Artificial Sequence: Synthetic antibody
IDNSKNTLYLQMNSLRAEDTAVYYCAKGPRPGGSWRFDYWGQG

SEQ ID NO: 3670 - DNA, 129 bp, Artificial Sequence
  Description of Artificial Sequence: Synthetic antibody
agagataattccaagaacacgctgtatctgcaaatgaacagcctgagagccgaggacacggccgtatattactgtgcgaaaggcccgcgacctgggggcagctggcgctttgactactggggccaggga

SEQ ID NO: 3671 - protein, 43 aa, Artificial Sequence
  Description of Artificial Sequence: Synthetic antibody
RDNSKNTLYLQMNSLRAEDTAVYYCAKGPRPGGSWRFDYWGQG

SEQ ID NO: 3672 - DNA, 129 bp, Artificial Sequence
  Description of Artificial Sequence: Synthetic antibody
agagataattccaagaacacgctgtatctgaaaatgaacagcctgagagccgaggacacggccgtatattactgtgcgaaaggcccgcgacctgggggcagctggcgctttgactactggggccaggga

SEQ ID NO: 3673 - protein, 43 aa, Artificial Sequence
  Description of Artificial Sequence: Synthetic antibody
RDNSKNTLYLKMNSLRAEDTAVYYCAKGPRPGGSWRFDYWGQG

SEQ ID NO: 3674 - DNA, 129 bp, Artificial Sequence
  Description of Artificial Sequence: Synthetic antibody
agagataattccaacaacacgctgtatctgcaaatgaacagcctgagagccgaggacacggccgtatattactgtgcgaaaggcccgcgacctgggggcagctggcgctttgactactggggccaggga

SEQ ID NO: 3675 - protein, 43 aa, Artificial Sequence
  Description of Artificial Sequence: Synthetic antibody
RDNSNNTLYLQMNSLRAEDTAVYYCAKGPRPGGSWRFDYWGQG

SEQ ID NO: 3676 - protein, 12 aa, Artificial Sequence
  Description of Artificial Sequence: Synthetic antibody
CAKTRSACFQHW

SEQ ID NO: 3677 - DNA, 129 bp, Artificial Sequence
  Description of Artificial Sequence: Synthetic antibody
ttcaccatctccagagacaattccaagaacacgctgtatctgcaaatgaacagcctgagagccgaggacacggccgtatattactgtgcgaaaacccggtccgcgtgcttccagcactggggccagggc

SEQ ID NO: 3678 - protein, 43 aa, Artificial Sequence
  Description of Artificial Sequence: Synthetic antibody
FTISRDNSKNTLYLQMNSLRAEDTAVYYCAKTRSACFQHWGQG

SEQ ID NO: 3679 - DNA, 129 bp, Artificial Sequence
  Description of Artificial Sequence: Synthetic antibody
ttcaccatctccagagacaataccaagaacacgctgtatctgcaaatcaacagcctgagagccgaggacacggccgtatattactgtgcgaaaacccggtccgcgtgcttccagcactggggccagggc

SEQ ID NO: 3680 - protein, 43 aa, Artificial Sequence
  Description of Artificial Sequence: Synthetic antibody
FTISRDNTKNTLYLQINSLRAEDTAVYYCAKTRSACFQHWGQG

SEQ ID NO: 3681 - DNA, 129 bp, Artificial Sequence
  Description of Artificial Sequence: Synthetic antibody
ttcaccatctccagacacaattccaagaacacgctgtatctgcaaatgaacagcctgagagccgaggacacggccgtatattactgtgcgaaaacccggtccgcgtgcttccagcactggggccagggc

SEQ ID NO: 3682 - protein, 43 aa, Artificial Sequence
  Description of Artificial Sequence: Synthetic antibody
FTISRHNSKNTLYLQMNSLRAEDTAVYYCAKTRSACFQHWGQG

SEQ ID NO: 3683 - DNA, 129 bp, Artificial Sequence
  Description of Artificial Sequence: Synthetic antibody
ttcaccatctccagacacaattccaagaacacgctgtatctgcaaatcaacagcctgagagccgaggacacggccgtatattactgtgcgaaaacccggtccgcgtgcttccagcactggggccagggc

SEQ ID NO: 3684 - protein, 43 aa, Artificial Sequence
  Description of Artificial Sequence: Synthetic antibody
FTISRHNSKNTLYLQINSLRAEDTAVYYCAKTRSACFQHWGQG

SEQ ID NO: 3685 - protein, 12 aa, Artificial Sequence
  Description of Artificial Sequence: Synthetic antibody
CAKPAVTGTGYW

SEQ ID NO: 3686 - DNA, 129 bp, Artificial Sequence
  Description of Artificial Sequence: Synthetic antibody
ttcaccatctccagatataattccaagaacacgctgtatctgcaaatgaacagcctgagagccgaggacacggccgtatattactgtgcgaaaccggcagtgactggtactggctattggggccaggga

SEQ ID NO: 3687 - protein, 43 aa, Artificial Sequence
  Description of Artificial Sequence: Synthetic antibody
FTISRYNSKNTLYLQMNSLRAEDTAVYYCAKPAVTGTGYWGQG

SEQ ID NO: 3688 - DNA, 129 bp, Artificial Sequence
  Description of Artificial Sequence: Synthetic antibody
ttcaccatctccagagataattccaagaacacgctgtatctgcaaatgaacagcctgagagccgaggacacggccgtatattactgtgcgaaaccggcagtgactggtactggctattggggccaggga

SEQ ID NO: 3689 - protein, 43 aa, Artificial Sequence
  Description of Artificial Sequence: Synthetic antibody
FTISRDNSKNTLYLQMNSLRAEDTAVYYCAKPAVTGTGYWGQG

SEQ ID NO: 3690 - DNA, 129 bp, Artificial Sequence
  Description of Artificial Sequence: Synthetic antibody
ttcaccatctccagacataattccaagaacacgctgtatctgcaaatcaacagcctgagagccgaggacacggccgtatattactgtgcgaaaccggcagtgactggtactggctattggggccaggga

SEQ ID NO: 3691 - protein, 43 aa, Artificial Sequence
  Description of Artificial Sequence: Synthetic antibody
FTISRHNSKNTLYLQINSLRAEDTAVYYCAKPAVTGTGYWGQG

SEQ ID NO: 3692 - DNA, 129 bp, Artificial Sequence
  Description of Artificial Sequence: Synthetic antibody
ttcaccacctccagagataattccgggaacacggtgtctctgcaaatgaacagcctgagagccgaggacacggccgtatattactgtgcgaaaccggcagtgactggtactggctattggggccaggga

SEQ ID NO: 3693 - protein, 43 aa, Artificial Sequence
  Description of Artificial Sequence: Synthetic antibody
FTTSRDNSGNTVSLQMNSLRAEDTAVYYCAKPAVTGTGYWGQG

SEQ ID NO: 3694 - protein, 21 aa, Artificial Sequence
  Description of Artificial Sequence: Synthetic antibody
CAREVGDGDGSSIGGYAFDIW

SEQ ID NO: 3695 - DNA, 129 bp, Artificial Sequence
  Description of Artificial Sequence: Synthetic antibody
agcactgcctacatggagctgaggagcctgagatctgacgacacggccgtgtattactgtgcgagagaggtcggggacggagatggcagctcaatcggagggtacgcttttgatatctggggccaaggg

SEQ ID NO: 3696 - protein, 43 aa, Artificial Sequence
  Description of Artificial Sequence: Synthetic antibody
STAYMELRSLRSDDTAVYYCAREVGDGDGSSIGGYAFDIWGQG

SEQ ID NO: 3697 - DNA, 129 bp, Artificial Sequence
  Description of Artificial Sequence: Synthetic antibody
agcacagcctacatggagctgaggagcctgagatctgacgacacggccgtgtattactgtgcgagagaggtcggggacggagatggcagctcaatcggagggtacgcttttgatatctggggccaaggg

SEQ ID NO: 3698 - DNA, 129 bp, Artificial Sequence
  Description of Artificial Sequence: Synthetic antibody
agcacagcctacacggagctgaggagcctgagatctgacgacacggccgtgtattactgtgcgagagaggtcggggacggagatggtagctcaatcggagggtacgcttttgatatctggggccaaggg

SEQ ID NO: 3699 - protein, 43 aa, Artificial Sequence
  Description of Artificial Sequence: Synthetic antibody
STAYTELRSLRSDDTAVYYCAREVGDGDGSSIGGYAFDIWGQG

SEQ ID NO: 3700 - DNA, 129 bp, Artificial Sequence
  Description of Artificial Sequence: Synthetic antibody
agcacagcctacacggagctgaggagcctgagatctgacgacacggccgtgtattactgtgcgagagaggtcggggacggagatggcagctcaatcggagggtacgcttttgatatctggggccaaggg

SEQ ID NO: 3701 - protein, 20 aa, Artificial Sequence
  Description of Artificial Sequence: Synthetic antibody
CAKAPSGGVATPHAGGMDVW

SEQ ID NO: 3702 - DNA, 129 bp, Artificial Sequence
  Description of Artificial Sequence: Synthetic antibody
aagaacacgctgtatctgcaaatgaacagcctgagagccgaggacacggccgtatattactgtgcgaaagccccttcgggtggggtggctaccccccacgccggtggtatggacgtctggggccaaggg

SEQ ID NO: 3703 - protein, 43 aa, Artificial Sequence
  Description of Artificial Sequence: Synthetic antibody
KNTLYLQMNSLRAEDTAVYYCAKAPSGGVATPHAGGMDVWGQG

SEQ ID NO: 3704 - DNA, 129 bp, Artificial Sequence
  Description of Artificial Sequence: Synthetic antibody
aagaacacgctgtatctgaaaatgaacagcctgagagccgaggacacggccgtatattactgtgcgaaagccccttcgggtggggtggctaccccccacgccggtggtatggacgtctggggccaaggg

SEQ ID NO: 3705 - protein, 43 aa, Artificial Sequence
  Description of Artificial Sequence: Synthetic antibody
KNTLYLKMNSLRAEDTAVYYCAKAPSGGVATPHAGGMDVWGQG

SEQ ID NO: 3706 - DNA, 129 bp, Artificial Sequence
  Description of Artificial Sequence: Synthetic antibody
aacaacacgctgtatctgcaaatgaacagcctgagagccgaggacacggccgtatattactgtgcgaaagccccttcgggtggggtggctaccccccacgccggtggtatggacgtctggggccaaggg

SEQ ID NO: 3707 - protein, 43 aa, Artificial Sequence
  Description of Artificial Sequence: Synthetic antibody
NNTLYLQMNSLRAEDTAVYYCAKAPSGGVATPHAGGMDVWGQG

SEQ ID NO: 3708 - DNA, 129 bp, Artificial Sequence
  Description of Artificial Sequence: Synthetic antibody
aagaacccgctgtatctgaaaatgaaccgcctgagcgccgaggacacggccgtatattactgtgcgaaagccccttcgggtggggtggctaccccccacgccggtggtatggacgtctggggccaaggg

SEQ ID NO: 3709 - protein, 43 aa, Artificial Sequence
  Description of Artificial Sequence: Synthetic antibody
KNPLYLKMNRLSAEDTAVYYCAKAPSGGVATPHAGGMDVWGQG

SEQ ID NO: 3710 - protein, 16 aa, Artificial Sequence
  Description of Artificial Sequence: Synthetic antibody
CARVGETVAAGMVDYW

SEQ ID NO: 3711 - DNA, 129 bp, Artificial Sequence
  Description of Artificial Sequence: Synthetic antibody
tgggacaacgccaagaactcactgtatctgcaaatgaacagcctgagagccgaggacacggccgtatattactgtgcgagagtgggggaaacagtagcagctggaatggtggactactggggccaggga

SEQ ID NO: 3712 - protein, 43 aa, Artificial Sequence
  Description of Artificial Sequence: Synthetic antibody
WDNAKNSLYLQMNSLRAEDTAVYYCARVGETVAAGMVDYWGQG

SEQ ID NO: 3713 - DNA, 129 bp, Artificial Sequence
  Description of Artificial Sequence: Synthetic antibody
tgggacaacgccaacaactcactgtatctgcaaatgaacagcctgagagccgaggacacggccgtatattactgtgcgagagtgggggaaacagtagcagctggaatggtggactactggggccaggga

SEQ ID NO: 3714 - protein, 43 aa, Artificial Sequence
  Description of Artificial Sequence: Synthetic antibody
WDNANNSLYLQMNSLRAEDTAVYYCARVGETVAAGMVDYWGQG

SEQ ID NO: 3715 - DNA, 129 bp, Artificial Sequence
  Description of Artificial Sequence: Synthetic antibody
agggacaacgccaagaactcactgtatctgcaaatgaacagcctgagagccgaggacacggccgtatattactgtgcgagagtgggggaaacagtagcagctggaatggtggactactggggccaggga

SEQ ID NO: 3716 - protein, 43 aa, Artificial Sequence
  Description of Artificial Sequence: Synthetic antibody
RDNAKNSLYLQMNSLRAEDTAVYYCARVGETVAAGMVDYWGQG

SEQ ID NO: 3717 - DNA, 129 bp, Artificial Sequence
  Description of Artificial Sequence: Synthetic antibody
agggacaacgccaagaactcactgtatctgcaaatgaacagcctgagagccgacgacacggccgtgtattactgtgcgagagtgggggagacagtagcagctggaatggtggactactggggccaggga

SEQ ID NO: 3718 - protein, 43 aa, Artificial Sequence
  Description of Artificial Sequence: Synthetic antibody
RDNAKNSLYLQMNSLRADDTAVYYCARVGETVAAGMVDYWGQG

SEQ ID NO: 3719 - protein, 15 aa, Artificial Sequence
  Description of Artificial Sequence: Synthetic antibody
CARWAKVTVGGMDVW

SEQ ID NO: 3720 - DNA, 129 bp, Artificial Sequence
  Description of Artificial Sequence: Synthetic antibody
acctgggacacgtccgcgagcacagccgacatggagctgagaagcctgagatctgaagacacggctgtatatttctgtgcgcgatgggctaaggtgactgttgggggtatggacgtctggggccaaggg

SEQ ID NO: 3721 - protein, 43 aa, Artificial Sequence
  Description of Artificial Sequence: Synthetic antibody
TWDTSASTADMELRSLRSEDTAVYFCARWAKVTVGGMDVWGQG

SEQ ID NO: 3722 - DNA, 129 bp, Artificial Sequence
  Description of Artificial Sequence: Synthetic antibody
acctgggacacgcccgcgagcacagccgacatggagctgagaagcctgagatctgaagacacggctgtatatttctgtgcgcgatgggctaaggtgactgttgggggtatggacgtctggggccaaggg

SEQ ID NO: 3723 - protein, 43 aa, Artificial Sequence
  Description of Artificial Sequence: Synthetic antibody
TWDTPASTADMELRSLRSEDTAVYFCARWAKVTVGGMDVWGQG

SEQ ID NO: 3724 - DNA, 129 bp, Artificial Sequence
  Description of Artificial Sequence: Synthetic antibody
accagggacacgtccgcgagcacagccgacatggagctgagaagcctgagatctgaagacacggctgtatatttctgtgcgcgatgggctaaggtgactgttgggggtatggacgtctggggccaaggg

SEQ ID NO: 3725 - protein, 43 aa, Artificial Sequence
  Description of Artificial Sequence: Synthetic antibody
TRDTSASTADMELRSLRSEDTAVYFCARWAKVTVGGMDVWGQG

SEQ ID NO: 3726 - DNA, 129 bp, Artificial Sequence
  Description of Artificial Sequence: Synthetic antibody
accagggacacgcccgcgagcacagccgacatggagctgagaagcctgatatctgaagacacggctgtatatttctgtgcgcgatgggctaaggtgactgttgggggtatggacgtctggggccaaggg

SEQ ID NO: 3727 - protein, 43 aa, Artificial Sequence
  Description of Artificial Sequence: Synthetic antibody
TRDTPASTADMELRSLISEDTAVYFCARWAKVTVGGMDVWGQG

SEQ ID NO: 3728 - protein, 22 aa, Artificial Sequence
  Description of Artificial Sequence: Synthetic antibody
CARAHYDFWSFSNPERYGMDVW

SEQ ID NO: 3729 - DNA, 129 bp, Artificial Sequence
  Description of Artificial Sequence: Synthetic antibody
tcgctgtatcttcaaatgaacagcctgagagccgaggacacggccgtgtattactgtgcgagagcccattacgatttttggagtttttcgaacccggagcgctacggtatggacgtctggggccaaggg

SEQ ID NO: 3730 - protein, 43 aa, Artificial Sequence
  Description of Artificial Sequence: Synthetic antibody
SLYLQMNSLRAEDTAVYYCARAHYDFWSFSNPERYGMDVWGQG

SEQ ID NO: 3731 - DNA, 129 bp, Artificial Sequence
  Description of Artificial Sequence: Synthetic antibody
tcgatgtatcttcaaatgaacagcctgagagccgaggacacggccgtgtattactgtgcgagagcccattacgatttttggagtttttcgaacccggagcgctacggtatggacgtctggggccaaggg

SEQ ID NO: 3732 - protein, 43 aa, Artificial Sequence
  Description of Artificial Sequence: Synthetic antibody
SMYLQMNSLRAEDTAVYYCARAHYDFWSFSNPERYGMDVWGQG

SEQ ID NO: 3733 - DNA, 129 bp, Artificial Sequence
  Description of Artificial Sequence: Synthetic antibody
acgctgtatcttcaaatgaacagcctgagagccgaggacacggccgtgtattactgtgcgagagcccattacgatttttggagtttttcgaacccggagcgctacggtatggacgtctggggccaaggg

SEQ ID NO: 3734 - protein, 43 aa, Artificial Sequence
  Description of Artificial Sequence: Synthetic antibody
TLYLQMNSLRAEDTAVYYCARAHYDFWSFSNPERYGMDVWGQG

SEQ ID NO: 3735 - DNA, 129 bp, Artificial Sequence
  Description of Artificial Sequence: Synthetic antibody
acgatgtatcttcaaatcaacagcctgagagccgaggacacggccgtgtattactgtgcgagagcccattacgatttttggagtttttcgaacccggagcgctacggtatggacgtctggggccaaggg

SEQ ID NO: 3736 - protein, 43 aa, Artificial Sequence
  Description of Artificial Sequence: Synthetic antibody
TMYLQINSLRAEDTAVYYCARAHYDFWSFSNPERYGMDVWGQG

SEQ ID NO: 3737 - protein, 21 aa, Artificial Sequence
  Description of Artificial Sequence: Synthetic antibody
CAKRQIKEGDTESRDKGIDCW

SEQ ID NO: 3738 - DNA, 129 bp, Artificial Sequence
  Description of Artificial Sequence: Synthetic antibody
aacatgatgtatttgcaaatcaacagcctgagagtcgaggacacggccctatattactgtgcgaaaaggcagataaaagagggtgacactgaatctcgcgataaaggcatcgactgctggggccaggga

SEQ ID NO: 3739 - protein, 43 aa, Artificial Sequence
  Description of Artificial Sequence: Synthetic antibody
NMMYLQINSLRVEDTALYYCAKRQIKEGDTESRDKGIDCWGQG

SEQ ID NO: 3740 - DNA, 129 bp, Artificial Sequence
  Description of Artificial Sequence: Synthetic antibody
aacatgatgtatttgcaaatgaacagcctgagagtcgaggacacggccctatattactgtgcgaaaaggcagataaaagagggtgacactgaatctcgcgataaaggcatcgactgctggggccaggga

SEQ ID NO: 3741 - protein, 43 aa, Artificial Sequence
  Description of Artificial Sequence: Synthetic antibody
NMMYLQMNSLRVEDTALYYCAKRQIKEGDTESRDKGIDCWGQG

SEQ ID NO: 3742 - DNA, 129 bp, Artificial Sequence
  Description of Artificial Sequence: Synthetic antibody
aacatgatgtatttccaaatcaacagcctgagagtcgaggacacggccctatattactgtgcgaaaaggcagataaaagagggtgacactgaatctcgcgataaaggcatcgactgctggggccaggga

SEQ ID NO: 3743 - protein, 43 aa, Artificial Sequence
  Description of Artificial Sequence: Synthetic antibody
NMMYFQINSLRVEDTALYYCAKRQIKEGDTESRDKGIDCWGQG

SEQ ID NO: 3744 - protein, 16 aa, Artificial Sequence
  Description of Artificial Sequence: Synthetic antibody
CAKDRLAAARWYFDLW

SEQ ID NO: 3745 - DNA, 129 bp, Artificial Sequence
  Description of Artificial Sequence: Synthetic antibody
agagacaattccaagaacacgctgtatctgcaaatcaatagcctgagagccgaagacacggccgtatattactgtgcgaaagatcgcctagcagccgcccgctggtactttgatctctggggccgtggc

SEQ ID NO: 3746 - protein, 43 aa, Artificial Sequence
  Description of Artificial Sequence: Synthetic antibody
RDNSKNTLYLQINSLRAEDTAVYYCAKDRLAAARWYFDLWGRG

SEQ ID NO: 3747 - DNA, 129 bp, Artificial Sequence
  Description of Artificial Sequence: Synthetic antibody
agagacaattccaacaacacgctgtatctgcaaatcaatcgcctgagagccgaagacacggccgtatattactgtgcgaaagatcgcctagcagccgcccgctggtactttgatctctggggccgtggc

SEQ ID NO: 3748 - protein, 43 aa, Artificial Sequence
  Description of Artificial Sequence: Synthetic antibody
RDNSNNTLYLQINRLRAEDTAVYYCAKDRLAAARWYFDLWGRG

SEQ ID NO: 3749 - DNA, 129 bp, Artificial Sequence
  Description of Artificial Sequence: Synthetic antibody
agagacaattccaacaacacgctgtatctgaaaatcaatagcctgagagccgaagacacggccgtatattactgtgcgaaagatcgcctagcagccgcccgctggtactttgatctctggggccgtggc

SEQ ID NO: 3750 - protein, 43 aa, Artificial Sequence
  Description of Artificial Sequence: Synthetic antibody
RDNSNNTLYLKINSLRAEDTAVYYCAKDRLAAARWYFDLWGRG

SEQ ID NO: 3751 - DNA, 129 bp, Artificial Sequence
  Description of Artificial Sequence: Synthetic antibody
agagaaaattccaagaacacgctgtatctgaaaatcaatagcctgagagccgaagacacggccgtatattactgtgcgaaagatcgcctagcagccgcccgctggtactttgatctctggggccgtggc

SEQ ID NO: 3752 - protein, 43 aa, Artificial Sequence
  Description of Artificial Sequence: Synthetic antibody
RENSKNTLYLKINSLRAEDTAVYYCAKDRLAAARWYFDLWGRG

SEQ ID NO: 3753 - protein, 13 aa, Artificial Sequence
  Description of Artificial Sequence: Synthetic antibody
CAKVTTGTVTDYW

SEQ ID NO: 3754 - DNA, 129 bp, Artificial Sequence
  Description of Artificial Sequence: Synthetic antibody
accatctccatacacaattccaagaacacgctgtatctgcaaatgaacagcctgagagccgaggacacggccgtatattactgtgcgaaagtaacaactggaacagtaactgactactggggccaggga

SEQ ID NO: 3755 - protein, 43 aa, Artificial Sequence
  Description of Artificial Sequence: Synthetic antibody
TISIHNSKNTLYLQMNSLRAEDTAVYYCAKVTTGTVTDYWGQG

SEQ ID NO: 3756 - DNA, 129 bp, Artificial Sequence
  Description of Artificial Sequence: Synthetic antibody
accatctccagagacaattccaagaacacgctgtatctgcaaatgaacagcctgagagccgaggacacggccgtatattactgtgcgaaagtaacaactggaacagtaactgactactggggccaggga

SEQ ID NO: 3757 - protein, 43 aa, Artificial Sequence
  Description of Artificial Sequence: Synthetic antibody
TISRDNSKNTLYLQMNSLRAEDTAVYYCAKVTTGTVTDYWGQG

SEQ ID NO: 3758 - DNA, 129 bp, Artificial Sequence
  Description of Artificial Sequence: Synthetic antibody
accatctccagacacaattccaagaacacgctgtatctgcaaatgaacagcctgagagccgaggacacggccgtatattactgtgcgaaagtaacaactggaacagtaactgactactggggccaggga

SEQ ID NO: 3759 - protein, 43 aa, Artificial Sequence
  Description of Artificial Sequence: Synthetic antibody
TISRHNSKNTLYLQMNSLRAEDTAVYYCAKVTTGTVTDYWGQG

SEQ ID NO: 3760 - DNA, 129 bp, Artificial Sequence
  Description of Artificial Sequence: Synthetic antibody
accatctccagacacaattccaacaacacgctgtatctgcaaatgaacagcctgagagccgaggacacggccgtatattactgtgcgaaagtaacaactggaacagtaactgactactggggccaggga

SEQ ID NO: 3761 - protein, 43 aa, Artificial Sequence
  Description of Artificial Sequence: Synthetic antibody
TISRHNSNNTLYLQMNSLRAEDTAVYYCAKVTTGTVTDYWGQG

SEQ ID NO: 3762 - protein, 15 aa, Artificial Sequence
  Description of Artificial Sequence: Synthetic antibody
CAKPRARQQPLFDYW

SEQ ID NO: 3763 - DNA, 129 bp, Artificial Sequence
  Description of Artificial Sequence: Synthetic antibody
tccatatataattccaagaacacgctgtatctgcaaatgaacagcctgagagccgaggacacggccgtatattactgtgcgaaaccccgggcgcggcagcagcccctatttgactactggggccaggga

SEQ ID NO: 3764 - protein, 43 aa, Artificial Sequence
  Description of Artificial Sequence: Synthetic antibody
SIYNSKNTLYLQMNSLRAEDTAVYYCAKPRARQQPLFDYWGQG

SEQ ID NO: 3765 - DNA, 129 bp, Artificial Sequence
  Description of Artificial Sequence: Synthetic antibody
tccagatataattccaagaacacgctgtatctgaaaatgaacagcctgagagccgaggacacggccgtatattactgtgcgaaaccccgggcgcggcagcagcccctatttgactactggggccaggga

SEQ ID NO: 3766 - protein, 43 aa, Artificial Sequence
  Description of Artificial Sequence: Synthetic antibody
SRYNSKNTLYLKMNSLRAEDTAVYYCAKPRARQQPLFDYWGQG

SEQ ID NO: 3767 - DNA, 129 bp, Artificial Sequence
  Description of Artificial Sequence: Synthetic antibody
tccagagataattccaagaacacgctgtatctgcaaatgaacagcctgagagccgaggacacggccgtatattactgtgcgaaaccccgggcgcggcagcagcccctatttgactactggggccaggga

SEQ ID NO: 3768 - protein, 43 aa, Artificial Sequence
  Description of Artificial Sequence: Synthetic antibody
SRDNSKNTLYLQMNSLRAEDTAVYYCAKPRARQQPLFDYWGQG

SEQ ID NO: 3769 - DNA, 129 bp, Artificial Sequence
  Description of Artificial Sequence: Synthetic antibody
tacagatataattccaagaacacgctgtatctgcaaatgaacagcctgagagccgaggacacggccgtatattactgtgcgaaaccccgggcgcggcagcagcccctatttgactactggggccaggga

SEQ ID NO: 3770 - protein, 43 aa, Artificial Sequence
  Description of Artificial Sequence: Synthetic antibody
YRYNSKNTLYLQMNSLRAEDTAVYYCAKPRARQQPLFDYWGQG

SEQ ID NO: 3771 - protein, 20 aa, Artificial Sequence
  Description of Artificial Sequence: Synthetic antibody
CTRVRVAGYSSSWYDAFDIW

SEQ ID NO: 3772 - DNA, 129 bp, Artificial Sequence
  Description of Artificial Sequence: Synthetic antibody
aagaatacggcgtatctgcaaatgaacagcctgaaaatcgaggacacggccgtgtattactgtactagagtgagggtcgccgggtatagcagcagctggtacgatgcttttgatatctggggccaaggg

SEQ ID NO: 3773 - protein, 43 aa, Artificial Sequence
  Description of Artificial Sequence: Synthetic antibody
KNTAYLQMNSLKIEDTAVYYCTRVRVAGYSSSWYDAFDIWGQG

SEQ ID NO: 3774 - DNA, 129 bp, Artificial Sequence
  Description of Artificial Sequence: Synthetic antibody
aagaatacggcgtatctgcaaatgaacagcctgaaaatcgaggacacggccgtgtattactgtactagagtgagggtcgccggctatagcagcagctggtacgatgcttttgatatctggggccaaggg

SEQ ID NO: 3775 - DNA, 129 bp, Artificial Sequence
  Description of Artificial Sequence: Synthetic antibody
aagaacacggcgtatctgcaaatgaacagcctgaaaaccgaggacacggccgtgtattactgtactagagtgagggtcgccgggtatagcagcagctggtacgatgcttttgatatctggggccaaggg

SEQ ID NO: 3776 - protein, 43 aa, Artificial Sequence
  Description of Artificial Sequence: Synthetic antibody
KNTAYLQMNSLKTEDTAVYYCTRVRVAGYSSSWYDAFDIWGQG

SEQ ID NO: 3777 - DNA, 129 bp, Artificial Sequence
  Description of Artificial Sequence: Synthetic antibody
aacaatacggcgtatctgcaaatcaacagcctgaaaatcgaggacacggccgtgtattactgtactagagtgagggtcgccgggtatagcagcagctggtacgatgcttttgatatctggggccaaggg

SEQ ID NO: 3778 - protein, 43 aa, Artificial Sequence
  Description of Artificial Sequence: Synthetic antibody
NNTAYLQINSLKIEDTAVYYCTRVRVAGYSSSWYDAFDIWGQG

SEQ ID NO: 3779 - protein, 17 aa, Artificial Sequence
  Description of Artificial Sequence: Synthetic antibody
CTTSGWPPYYYYGMDVW

SEQ ID NO: 3780 - DNA, 129 bp, Artificial Sequence
  Description of Artificial Sequence: Synthetic antibody
tatgattcaaagaacacggcgtatctgcaaatgaacagcctgaaaaccgaggacacggccgtgtattactgtaccaccagtggctggcccccatactactactacggtatggacgtctggggccaaggg

SEQ ID NO: 3781 - protein, 43 aa, Artificial Sequence
  Description of Artificial Sequence: Synthetic antibody
YDSKNTAYLQMNSLKTEDTAVYYCTTSGWPPYYYYGMDVWGQG

SEQ ID NO: 3782 - DNA, 129 bp, Artificial Sequence
  Description of Artificial Sequence: Synthetic antibody
gattattcaaagaacacggcgtatctgcaaatgaacagcctgaaaaccgaggacacggccgtgtattactgtaccaccagtggctggcccccatactactactacggtatggacgtctggggccaaggg

SEQ ID NO: 3783 - protein, 43 aa, Artificial Sequence
  Description of Artificial Sequence: Synthetic antibody
DYSKNTAYLQMNSLKTEDTAVYYCTTSGWPPYYYYGMDVWGQG

SEQ ID NO: 3784 - DNA, 129 bp, Artificial Sequence
  Description of Artificial Sequence: Synthetic antibody
tatgattcaaacaacacggcgtatctgcaaatgaacagcctgaaaaccgaggacacggccgtgtattactgtaccaccagtggctggcccccatactactactacggtatggacgtctggggccaaggg

SEQ ID NO: 3785 - protein, 43 aa, Artificial Sequence
  Description of Artificial Sequence: Synthetic antibody
YDSNNTAYLQMNSLKTEDTAVYYCTTSGWPPYYYYGMDVWGQG

SEQ ID NO: 3786 - DNA, 129 bp, Artificial Sequence
  Description of Artificial Sequence: Synthetic antibody
gatgattcaaagaacacggcgtatctgcaaatgaacagcctgaaaaccgaggacacggccgtgtattactgtaccaccagtggctggcccccatactactactacggtatggacgtctggggccaaggg

SEQ ID NO: 3787 - protein, 43 aa, Artificial Sequence
  Description of Artificial Sequence: Synthetic antibody
DDSKNTAYLQMNSLKTEDTAVYYCTTSGWPPYYYYGMDVWGQG

SEQ ID NO: 3788 - protein, 14 aa, Artificial Sequence [sequence omitted]

SEQ ID NO: 3789 - DNA, 129 bp, Artificial Sequence
  Description of Artificial Sequence: Synthetic antibody
ttctccagacataattccaagaacacgctgtatctgcaaatgaacagcctgagagccgaggacacggccgtatattactgtgcgaaagggggcagcagctggtactactttgactactggggccaggga

SEQ ID NO: 3790 - protein, 43 aa, Artificial Sequence
  Description of Artificial Sequence: Synthetic antibody
FSRHNSKNTLYLQMNSLRAEDTAVYYCAKGGSSWYYFDYWGQG

SEQ ID NO: 3791 - DNA, 129 bp, Artificial Sequence
  Description of Artificial Sequence: Synthetic antibody
atctccatatataattccaagaacacgctgtatctgcaaatgaacagcctgagagccgaggacacggccgtatattactgtgcgaaagggggcagcagctggtactactttgactactggggccaggga

SEQ ID NO: 3792 - protein, 43 aa, Artificial Sequence
  Description of Artificial Sequence: Synthetic antibody
ISIYNSKNTLYLQMNSLRAEDTAVYYCAKGGSSWYYFDYWGQG

SEQ ID NO: 3793 - DNA, 129 bp, Artificial Sequence
  Description of Artificial Sequence: Synthetic antibody
atctccatacataattccaagaacacgctgtatctgcaaatgaacagcctgagagccgaggacacggccgtatattactgtgcgaaagggggcagcagctggtactactttgactactggggccaggga

SEQ ID NO: 3794 - protein, 43 aa, Artificial Sequence
  Description of Artificial Sequence: Synthetic antibody
ISIHNSKNTLYLQMNSLRAEDTAVYYCAKGGSSWYYFDYWGQG

SEQ ID NO: 3795 - DNA, 129 bp, Artificial Sequence
  Description of Artificial Sequence: Synthetic antibody
atctccagagataattccaagaacacgctgtatctgcaaatgaacagcctgagagccgaggacacggccgtatattactgtgcgaaagggggcagcagctggtactactttgactactggggccaggga

SEQ ID NO: 3796 - protein, 43 aa, Artificial Sequence
  Description of Artificial Sequence: Synthetic antibody
ISRDNSKNTLYLQMNSLRAEDTAVYYCAKGGSSWYYFDYWGQG

SEQ ID NO: 3797 - protein, 17 aa, Artificial Sequence
  Description of Artificial Sequence: Synthetic antibody
CAKDHIALDGLWDSDYW

SEQ ID NO: 3798 - DNA, 129 bp, Artificial Sequence
  Description of Artificial Sequence: Synthetic antibody
gacgactccaagaacacgatgtttctccacatgaacagactgagagtcgacgacacggccgtatatttctgtgcgaaagaccacattgcccttgatggcctctgggactctgactactggggccaggga

SEQ ID NO: 3799 - protein, 43 aa, Artificial Sequence
  Description of Artificial Sequence: Synthetic antibody
DDSKNTMFLHMNRLRVDDTAVYFCAKDHIALDGLWDSDYWGQG

SEQ ID NO: 3800 - DNA, 129 bp, Artificial Sequence
  Description of Artificial Sequence: Synthetic antibody
cacgactccaagaacacgatgtttctccacatgaacagactgagagtcgacgacacggccgtatatttctgtgcgaaagaccacattgcccttgatggcctctgggactctgactactggggccaggga

SEQ ID NO: 3801 - protein, 43 aa, Artificial Sequence
  Description of Artificial Sequence: Synthetic antibody
HDSKNTMFLHMNRLRVDDTAVYFCAKDHIALDGLWDSDYWGQG

SEQ ID NO: 3802 - protein, 19 aa, Artificial Sequence
  Description of Artificial Sequence: Synthetic antibody
CVRDRKSRGWFPDDVFDMW

SEQ ID NO: 3803 - DNA, 129 bp, Artificial Sequence
  Description of Artificial Sequence: Synthetic antibody
gctaataattcagtgtatttgcagatgaacaacctgagagacgaggacacggctctatatttttgtgtcagagatcggaagagtagaggctggttccccgatgatgtttttgatatgtggggccaaggg

SEQ ID NO: 3804 - protein, 43 aa, Artificial Sequence
  Description of Artificial Sequence: Synthetic antibody
ANNSVYLQMNNLRDEDTALYFCVRDRKSRGWFPDDVFDMWGQG

SEQ ID NO: 3805 - DNA, 129 bp, Artificial Sequence
  Description of Artificial Sequence: Synthetic antibody
gcgaataattctgtgtatttgcagatgaacaacctgagagacgaggacacggctctatatttttgtgtcagagatcggaagagtagaggctggttccccgatgatgtttttgatatgtggggccaaggg

SEQ ID NO: 3806 - DNA, 129 bp, Artificial Sequence
  Description of Artificial Sequence: Synthetic antibody
gcgaagaattcagtgtatttgcagatgaacaacctgagagacgaggacacggctctatatttttgtgtcagagatcggaagagtagaggctggttccccgatgatgtttttgatatgtggggccaaggg

SEQ ID NO: 3807 - protein, 43 aa, Artificial Sequence
  Description of Artificial Sequence: Synthetic antibody
AKNSVYLQMNNLRDEDTALYFCVRDRKSRGWFPDDVFDMWGQG

SEQ ID NO: 3808 - DNA, 129 bp, Artificial Sequence
  Description of Artificial Sequence: Synthetic antibody
gcgaagaattatgtgtatttgcagatgaacaacctgagagacgaggacacggctctatatttttgtgtcagagatcggaagagtagaggctggttccccgatgatgtttttgatatgtggggccaaggg

SEQ ID NO: 3809 - protein, 43 aa, Artificial Sequence
  Description of Artificial Sequence: Synthetic antibody
AKNYVYLQMNNLRDEDTALYFCVRDRKSRGWFPDDVFDMWGQG

SEQ ID NO: 3810 - protein, 16 aa, Artificial Sequence
  Description of Artificial Sequence: Synthetic antibody
CTHNVGGWDGPYSDYW

SEQ ID NO: 3811 - DNA, 129 bp, Artificial Sequence
  Description of Artificial Sequence: Synthetic antibody
aaggacacctccaaaaaccgggtggtccttacaatgaccaacatggaccctgtggacacagccacatatttctgtacacacaatgttggaggctgggatgggccgtactctgactactggggccaggga

SEQ ID NO: 3812 - protein, 43 aa, Artificial Sequence
  Description of Artificial Sequence: Synthetic antibody
KDTSKNRVVLTMTNMDPVDTATYFCTHNVGGWDGPYSDYWGQG

SEQ ID NO: 3813 - DNA, 129 bp, Artificial Sequence
  Description of Artificial Sequence: Synthetic antibody
aaggacacctccaaaaaccgggtggtcctcacaatgaccaacatggaccctgtggacacagccacatatttctgtacacacaatgttggaggctgggatgggccgtactctgactactggggccaggga

SEQ ID NO: 3814 - DNA, 129 bp, Artificial Sequence
  Description of Artificial Sequence: Synthetic antibody
aaggacacctccaaaaaccaggtggtccttacaatgaccaacatgggccctgtggacacagccacatattactgtacacacaatgttggaggctgggatggcccgtactctgactactggggccaggga

SEQ ID NO: 3815 - protein, 43 aa, Artificial Sequence
  Description of Artificial Sequence: Synthetic antibody
KDTSKNQVVLTMTNMGPVDTATYYCTHNVGGWDGPYSDYWGQG

SEQ ID NO: 3816 - DNA, 129 bp, Artificial Sequence
  Description of Artificial Sequence: Synthetic antibody
aaggacacctccaaaaaccaggtggtcctgaccatgtccaacatggaccctgtggacacagccacatattactgtacacacaatgttggaggctgggatgggccgtactctgactactggggccaggga

SEQ ID NO: 3817 - protein, 43 aa, Artificial Sequence
  Description of Artificial Sequence: Synthetic antibody
KDTSKNQVVLTMSNMDPVDTATYYCTHNVGGWDGPYSDYWGQG

SEQ ID NO: 3818 - protein, 12 aa, Artificial Sequence
  Description of Artificial Sequence: Synthetic antibody
CTTQGSQGMDVW

SEQ ID NO: 3819 - DNA, 129 bp, Artificial Sequence
  Description of Artificial Sequence: Synthetic antibody
ttcaccatctccttagatgactcaaagaacacggcgtatctgcaaatgaacagcctgaaagccgaggacacggccgtatattactgtactacccagggatcacagggcatggacgtctggggccaaggg

SEQ ID NO: 3820 - protein, 43 aa, Artificial Sequence
  Description of Artificial Sequence: Synthetic antibody
FTISLDDSKNTAYLQMNSLKAEDTAVYYCTTQGSQGMDVWGQG

SEQ ID NO: 3821 - DNA, 129 bp, Artificial Sequence
  Description of Artificial Sequence: Synthetic antibody
ttcaccatctccagagatgactcaaagaacacggcgtatctgcaaatgaacagcctgaaggccgaggatacggccgtatattactgtactacccagggatcacagggcatggacgtctggggccaaggg

SEQ ID NO: 3822 - protein, 43 aa, Artificial Sequence
  Description of Artificial Sequence: Synthetic antibody
FTISRDDSKNTAYLQMNSLKAEDTAVYYCTTQGSQGMDVWGQG

SEQ ID NO: 3823 - DNA, 129 bp, Artificial Sequence
  Description of Artificial Sequence: Synthetic antibody
ttcaccatctccagagatgactcaaagaacacggcgtatctgcaaatgaacagcctgaaagccgaggacacggccgtatattactgtactacccagggatcacagggcatggacgtctggggccaaggg

SEQ ID NO: 3824 - DNA, 129 bp, Artificial Sequence
  Description of Artificial Sequence: Synthetic antibody
ttcaccatctccagacattactcaaagaacacggcgtatctgcaaatgaacagcctgaaagccgaggacacggccgtatattactgtactacccagggatcacagggcatggacgtctggggccaaggg

SEQ ID NO: 3825 - protein, 43 aa, Artificial Sequence
  Description of Artificial Sequence: Synthetic antibody
FTISRHYSKNTAYLQMNSLKAEDTAVYYCTTQGSQGMDVWGQG

SEQ ID NO: 3826 - protein, 10 aa, Artificial Sequence
  Description of Artificial Sequence: Synthetic antibody
CASGREAGYW

SEQ ID NO: 3827 - DNA, 129 bp, Artificial Sequence
  Description of Artificial Sequence: Synthetic antibody
ggcagagtcaccatgaccaggaacacctccataagcacagcctacatggagctgagcagcctgagatctgaggacacggccgtgtattactgtgcgagtgggagggaggcagggtactggggccaggga

SEQ ID NO: 3828 - protein, 43 aa, Artificial Sequence
  Description of Artificial Sequence: Synthetic antibody
GRVTMTRNTSISTAYMELSSLRSEDTAVYYCASGREAGYWGQG

SEQ ID NO: 3829 - DNA, 129 bp, Artificial Sequence
  Description of Artificial Sequence: Synthetic antibody
ggcagagtcaccatgaccagcaacacctccataagcacagcctacatggagctgagcagcctgatatctgaggacacggccgtgtattactgtgcgagtgggagggaggcagggtactggggccaggga

SEQ ID NO: 3830 - protein, 43 aa, Artificial Sequence
  Description of Artificial Sequence: Synthetic antibody
GRVTMTSNTSISTAYMELSSLISEDTAVYYCASGREAGYWGQG

SEQ ID NO: 3831 - DNA, 129 bp, Artificial Sequence
  Description of Artificial Sequence: Synthetic antibody
ggcagagtcaccatgaccagcaacacctccataagcacagcctacatggagctgagcagcctgagatctgaggacacggccgtgtattactgtgcgagtgggagggaggcagggtactggggccaggga

SEQ ID NO: 3832 - protein, 43 aa, Artificial Sequence
  Description of Artificial Sequence: Synthetic antibody
GRVTMTSNTSISTAYMELSSLRSEDTAVYYCASGREAGYWGQG

SEQ ID NO: 3833 - DNA, 129 bp, Artificial Sequence
  Description of Artificial Sequence: Synthetic antibody
ggcagagtcaccatgaccagcaacacctccataaccacagcctacatggagctgagcagcctgagatctgaggacacggccgtgtattactgtgcgagtgggagggaggcagggtactggggccaggga

SEQ ID NO: 3834 - protein, 43 aa, Artificial Sequence
  Description of Artificial Sequence: Synthetic antibody
GRVTMTSNTSITTAYMELSSLRSEDTAVYYCASGREAGYWGQG

SEQ ID NO: 3835 - protein, 14 aa, Artificial Sequence
  Description of Artificial Sequence: Synthetic antibody
CAKLLSVRSYFDYW

SEQ ID NO: 3836 - DNA, 129 bp, Artificial Sequence
  Description of Artificial Sequence: Synthetic antibody
atctccatatataattccaagaacacgctgtatctgcaaatgaacagcctgagagccgaggacacggccgtatattactgtgcgaaactcctcagcgtccgtagctactttgactactggggccaggga

SEQ ID NO: 3837 - protein, 43 aa, Artificial Sequence
  Description of Artificial Sequence: Synthetic antibody
ISIYNSKNTLYLQMNSLRAEDTAVYYCAKLLSVRSYFDYWGQG

SEQ ID NO: 3838 - DNA, 129 bp, Artificial Sequence
  Description of Artificial Sequence: Synthetic antibody
atctccatacataattccaagaacacgctgtatctgcaaatgaacagcctgagagccgaggacacggccgtatattactgtgcgaaactcctcagcgtccgtagctactttgactactggggccaggga

SEQ ID NO: 3839 - protein, 43 aa, Artificial Sequence
  Description of Artificial Sequence: Synthetic antibody
ISIHNSKNTLYLQMNSLRAEDTAVYYCAKLLSVRSYFDYWGQG

SEQ ID NO: 3840 - DNA, 129 bp, Artificial Sequence
  Description of Artificial Sequence: Synthetic antibody
atctccagatataattccaacaacacgctgtatctgcaaatgaacagcctgagagccgaggacacggccgtatattactgtgcgaaactcctcagcgtccgtagctactttgactactggggccaggga

SEQ ID NO: 3841 - protein, 43 aa, Artificial Sequence
  Description of Artificial Sequence: Synthetic antibody
ISRYNSNNTLYLQMNSLRAEDTAVYYCAKLLSVRSYFDYWGQG

SEQ ID NO: 3842 - DNA, 129 bp, Artificial Sequence
  Description of Artificial Sequence: Synthetic antibody
atctccagagataattccaagaacacgctgtatctgcaaatgaacagcctgagagccgaggacacggccgtatattactgtgcgaaactcctcagcgtccgtagctactttgactactggggccaggga

SEQ ID NO: 3843 - protein, 43 aa, Artificial Sequence
  Description of Artificial Sequence: Synthetic antibody
ISRDNSKNTLYLQMNSLRAEDTAVYYCAKLLSVRSYFDYWGQG

SEQ ID NO: 3844 - protein, 14 aa, Artificial Sequence
  Description of Artificial Sequence: Synthetic antibody
CARGGSDNWHLDLW

SEQ ID NO: 3845 - DNA, 129 bp, Artificial Sequence
  Description of Artificial Sequence: Synthetic antibody
tttaccagggacatatccgcgactacagcctacctggaactgaccagcctgacttctgaagacacggctttctattactgtgcgagaggagggagcgacaactggcacctcgatctgtggggccgtggc

SEQ ID NO: 3846 - protein, 43 aa, Artificial Sequence
  Description of Artificial Sequence: Synthetic antibody
FTRDISATTAYLELTSLTSEDTAFYYCARGGSDNWHLDLWGRG

SEQ ID NO: 3847 - DNA, 129 bp, Artificial Sequence
  Description of Artificial Sequence: Synthetic antibody
tttaccagagacacatccgcgactacagcctacatggaactgaccagcctgaggtctgaagacacggctgtatattactgtgcgagaggagggagcgacaactggcacctcgatctgtggggccgtggc

SEQ ID NO: 3848 - protein, 43 aa, Artificial Sequence
  Description of Artificial Sequence: Synthetic antibody
FTRDTSATTAYMELTSLRSEDTAVYYCARGGSDNWHLDLWGRG

SEQ ID NO: 3849 - DNA, 129 bp, Artificial Sequence
  Description of Artificial Sequence: Synthetic antibody
tttaccagacacacatccgcgactacagcctacatggaactgaccagcctgaggtctgaagacacggctgtatattactgtgcgagaggagggagcgacaactggcacctcgatctgtggggccgtggc

SEQ ID NO: 3850 - protein, 43 aa, Artificial Sequence
  Description of Artificial Sequence: Synthetic antibody
FTRHTSATTAYMELTSLRSEDTAVYYCARGGSDNWHLDLWGRG

SEQ ID NO: 3851 - DNA, 129 bp, Artificial Sequence
  Description of Artificial Sequence: Synthetic antibody
ttaaccagacacacatccgcgactacagcctacatggaactgaccagcctgaggtctgaagacacggctgtatattactgtgcgagaggagggagcgacaactggcacctcgatctgtggggccgtggc

SEQ ID NO: 3852 - protein, 43 aa, Artificial Sequence
  Description of Artificial Sequence: Synthetic antibody
LTRHTSATTAYMELTSLRSEDTAVYYCARGGSDNWHLDLWGRG

SEQ ID NO: 3853 - protein, 15 aa, Artificial Sequence
  Description of Artificial Sequence: Synthetic antibody
CTRGGVVGVSAPYDW

SEQ ID NO: 3854 - DNA, 129 bp, Artificial Sequence
  Description of Artificial Sequence: Synthetic antibody
gccagagacaattccaagaacacgctgtatcttcaaatgaacagcctgagagccgaggacacgggcgtgtatttatgtacgagagggggtgtagtgggggttagtgccccttacgactggggcctggga

SEQ ID NO: 3855 - protein, 43 aa, Artificial Sequence
  Description of Artificial Sequence: Synthetic antibody
ARDNSKNTLYLQMNSLRAEDTGVYLCTRGGVVGVSAPYDWGLG

SEQ ID NO: 3856 - DNA, 129 bp, Artificial Sequence
  Description of Artificial Sequence: Synthetic antibody
gccagagacaattccaagaacacgctgtatcttcaaatgaacagcctgagagccgaggacacgggcgtgtatttatgtacgagagggggggtagtgggggttagtgccccttacgactggggcctggga

SEQ ID NO: 3857 - DNA, 129 bp, Artificial Sequence
  Description of Artificial Sequence: Synthetic antibody
gacagagacaattccaagaacacgctgtatcttcaaatgaacagcctgagagccgatgacacgggcgtgtatttatgtacgagagggggtgtagtgggggttagtgccccttacgactggggcctggga

SEQ ID NO: 3858 - protein, 43 aa, Artificial Sequence
  Description of Artificial Sequence: Synthetic antibody
DRDNSKNTLYLQMNSLRADDTGVYLCTRGGVVGVSAPYDWGLG

SEQ ID NO: 3859 - DNA, 129 bp, Artificial Sequence
  Description of Artificial Sequence: Synthetic antibody
gacagagacaattccaagaacacgctgtatcttcaaatgaacagcctgagagccgaggacacgggcgtgtatttatgtacgagagggggggtagtgggggttagtgccccttacgactggggcctggga

SEQ ID NO: 3860 - protein, 43 aa, Artificial Sequence
  Description of Artificial Sequence: Synthetic antibody
DRDNSKNTLYLQMNSLRAEDTGVYLCTRGGVVGVSAPYDWGLG

SEQ ID NO: 3861 - protein, 13 aa, Artificial Sequence
  Description of Artificial Sequence: Synthetic antibody
CARQGRGNWFDPW

SEQ ID NO: 3862 - DNA, 129 bp, Artificial Sequence
  Description of Artificial Sequence: Synthetic antibody
accatatcagtagacacgtccaagaaccagttctccctgaagctgagctctgtgaccgccgcagacacggccgtgtattactgtgcgagacagggtagagggaactggttcgacccctggggccaggga

SEQ ID NO: 3863 - protein, 43 aa, Artificial Sequence
  Description of Artificial Sequence: Synthetic antibody
TISVDTSKNQFSLKLSSVTAADTAVYYCARQGRGNWFDPWGQG

SEQ ID NO: 3864 - DNA, 129 bp, Artificial Sequence
  Description of Artificial Sequence: Synthetic antibody
accatatcagtacacacgtccaagaaccagttctccctgaagctgagctctgtgaccgccgcagacacggccgtgtattactgtgcgagacagggtagagggaactggttcgacccctggggccaggga

SEQ ID NO: 3865 - protein, 43 aa, Artificial Sequence
  Description of Artificial Sequence: Synthetic antibody
TISVHTSKNQFSLKLSSVTAADTAVYYCARQGRGNWFDPWGQG

SEQ ID NO: 3866 - DNA, 129 bp, Artificial Sequence
  Description of Artificial Sequence: Synthetic antibody
acaatatcagtacacacgtccaagaaccagttctccctgaagctgagctctgtgaccgccgcagacacggccgtgtattactgtgcgagacagggtagagggaactggttcgacccctggggccaggga

SEQ ID NO: 3867 - DNA, 129 bp, Artificial Sequence
  Description of Artificial Sequence: Synthetic antibody
aacatatcagtagacacgtccaagaaccagttctccctgaagctgagctctgtgaccgccgcagacacggccgtgtattactgtgcgagacagggtagagggaactggttcgacccctggggccaggga

SEQ ID NO: 3868 - protein, 43 aa, Artificial Sequence
  Description of Artificial Sequence: Synthetic antibody
NISVDTSKNQFSLKLSSVTAADTAVYYCARQGRGNWFDPWGQG

SEQ ID NO: 3869 - protein, 15 aa, Artificial Sequence
  Description of Artificial Sequence: Synthetic antibody
CAREAVGATPFFDDW

SEQ ID NO: 3870 - DNA, 129 bp, Artificial Sequence
  Description of Artificial Sequence: Synthetic antibody
tcagtagacacgtccaagaaccagttctccctgaagctgagctctgtgtccgccgcggacacggccgtatattattgtgcgagagaggcggtgggagccactcccttttttgacgactggggccaggga

SEQ ID NO: 3871 - protein, 43 aa, Artificial Sequence
  Description of Artificial Sequence: Synthetic antibody
SVDTSKNQFSLKLSSVSAADTAVYYCAREAVGATPFFDDWGQG

SEQ ID NO: 3872 - DNA, 129 bp, Artificial Sequence
  Description of Artificial Sequence: Synthetic antibody
tcagtagacacgtccaagaaccagttctccctgaagctgagctctgtggccgccgcggacacggccgtatattattgtgcgagagaggcggtgggagccactcccttttttgacgactggggccaggga

SEQ ID NO: 3873 - protein, 43 aa, Artificial Sequence
  Description of Artificial Sequence: Synthetic antibody
SVDTSKNQFSLKLSSVAAADTAVYYCAREAVGATPFFDDWGQG

SEQ ID NO: 3874 - DNA, 129 bp, Artificial Sequence
  Description of Artificial Sequence: Synthetic antibody
tcagtagacacgtccaacaaccagttctccctgaagctgagctctgtgtccgccgcggacacggccgtatattattgtgcgagagaggcggtgggagccactcccttttttgacgactggggccaggga

SEQ ID NO: 3875 - protein, 43 aa, Artificial Sequence
  Description of Artificial Sequence: Synthetic antibody
SVDTSNNQFSLKLSSVSAADTAVYYCAREAVGATPFFDDWGQG

SEQ ID NO: 3876 - DNA, 129 bp, Artificial Sequence
  Description of Artificial Sequence: Synthetic antibody
tcagtacacacgtccaacaaccagttctccctgaagctgagctctgtgtccgccgcggacacggccgtatattattgtgcgagagaggcggtgggagccactcccttttttgacgactggggccaggga

SEQ ID NO: 3877 - protein, 43 aa, Artificial Sequence
  Description of Artificial Sequence: Synthetic antibody
SVHTSNNQFSLKLSSVSAADTAVYYCAREAVGATPFFDDWGQG

SEQ ID NO: 3878 - protein, 19 aa, Artificial Sequence
  Description of Artificial Sequence: Synthetic antibody
CVRVPAAAGKGVPGIFDIW

SEQ ID NO: 3879 - DNA, 129 bp, Artificial Sequence
  Description of Artificial Sequence: Synthetic antibody
tcctcgacctcagtctacatggagctgaggagcctgagatctgacgacacggccgtgtattactgtgtgagagtaccagcagcagctggaaagggcgtccctggtatttttgatatttggggccaaggg

SEQ ID NO: 3880 - protein, 43 aa, Artificial Sequence
  Description of Artificial Sequence: Synthetic antibody
SSTSVYMELRSLRSDDTAVYYCVRVPAAAGKGVPGIFDIWGQG

SEQ ID NO: 3881 - DNA, 129 bp, Artificial Sequence
  Description of Artificial Sequence: Synthetic antibody
tccacgaccacagtctacatggagctgaggagcctgagatctgacgacacggccgtgtattactgtgtgagagtaccagcagcagctggaaagggcgtccctggtatttttgatatttggggccaaggg

SEQ ID NO: 3882 - protein, 43 aa, Artificial Sequence
  Description of Artificial Sequence: Synthetic antibody
STTTVYMELRSLRSDDTAVYYCVRVPAAAGKGVPGIFDIWGQG

SEQ ID NO: 3883 - DNA, 129 bp, Artificial Sequence
  Description of Artificial Sequence: Synthetic antibody
cccacgaccacagtctacatggagctgaggagcctgagatctgacgacacggccgtgtattactgtgtgagagtaccagcagcagctggaaagggcgtccctggtatttttgatatttggggccaaggg

SEQ ID NO: 3884 - protein, 43 aa, Artificial Sequence
  Description of Artificial Sequence: Synthetic antibody
PTTTVYMELRSLRSDDTAVYYCVRVPAAAGKGVPGIFDIWGQG

SEQ ID NO: 3885 - DNA, 129 bp, Artificial Sequence
  Description of Artificial Sequence: Synthetic antibody
cccacgaccaaagtctacatggagctgaggagcctgagatctgacgacacggccgtgtattactgtgtgagagtaccagcagcagctggaaagggcgtccctggtatttttgatatttggggccaaggg

SEQ ID NO: 3886 - protein, 43 aa, Artificial Sequence
  Description of Artificial Sequence: Synthetic antibody
PTTKVYMELRSLRSDDTAVYYCVRVPAAAGKGVPGIFDIWGQG

SEQ ID NO: 3887 - protein, 18 aa, Artificial Sequence
  Description of Artificial Sequence: Synthetic antibody
CAKDGTEWWESLTFYDYW

SEQ ID NO: 3888 - DNA, 129 bp, Artificial Sequence
  Description of Artificial Sequence: Synthetic antibody
aattccaagaacacgctgtatctgcaaatgaatagcctgagagtcgacgactcgggtgtgtactactgtgcgaaagatggtacggagtggtgggagtcactcaccttctatgactactggggccaggga

SEQ ID NO: 3889 - protein, 43 aa, Artificial Sequence
  Description of Artificial Sequence: Synthetic antibody
NSKNTLYLQMNSLRVDDSGVYYCAKDGTEWWESLTFYDYWGQG

SEQ ID NO: 3890 - DNA, 129 bp, Artificial Sequence
  Description of Artificial Sequence: Synthetic antibody
aattccaagaacacgctgtatctgaaaatgaatagcctgagaggcgacgactcgggtgtgtactactgtgcgaaagatggtacggagtggtgggagtcactcaccttctatgactactggggccaggga

SEQ ID NO: 3891 - protein, 43 aa, Artificial Sequence
  Description of Artificial Sequence: Synthetic antibody
NSKNTLYLKMNSLRGDDSGVYYCAKDGTEWWESLTFYDYWGQG

SEQ ID NO: 3892 - DNA, 129 bp, Artificial Sequence
  Description of Artificial Sequence: Synthetic antibody
aattccaacaacacgctgtatctgaaaatgaatagcctgagagtcgacgactcgggtgtgtactactgtgcgaaagatggtacggagtggtgggagtcactcaccttctatgactactggggccaggga

SEQ ID NO: 3893 - protein, 43 aa, Artificial Sequence
  Description of Artificial Sequence: Synthetic antibody
NSNNTLYLKMNSLRVDDSGVYYCAKDGTEWWESLTFYDYWGQG

SEQ ID NO: 3894 - DNA, 129 bp, Artificial Sequence
  Description of Artificial Sequence: Synthetic antibody
aattccaagaacacgctgtatctgcaaatgaatcgcctgagagtcgacgactcgggtgtgtactactgtgcgaaagatggtacggagtggtgggagtcactcaccttctatgactactggggccaggga

SEQ ID NO: 3895 - protein, 43 aa, Artificial Sequence
  Description of Artificial Sequence: Synthetic antibody
NSKNTLYLQMNRLRVDDSGVYYCAKDGTEWWESLTFYDYWGQG

SEQ ID NO: 3896 - protein, 13 aa, Artificial Sequence
  Description of Artificial Sequence: Synthetic antibody
CAREGGGSSFDYW

SEQ ID NO: 3897 - DNA, 129 bp, Artificial Sequence
  Description of Artificial Sequence: Synthetic antibody
accatcaacccggacacatccaagaaccagttctccctgcagctgaactctgtgactcccgaggacacggctgtgtattactgtgcaagagaggggggtgggagttcgtttgactactggggccaggga

SEQ ID NO: 3898 - protein, 43 aa, Artificial Sequence
  Description of Artificial Sequence: Synthetic antibody
TINPDTSKNQFSLQLNSVTPEDTAVYYCAREGGGSSFDYWGQG

SEQ ID NO: 3899 - DNA, 129 bp, Artificial Sequence
  Description of Artificial Sequence: Synthetic antibody
accatcaacccggacacatccaagaaccagttctccctgcagctgaactctgtgactcccaaggacacggctgtgtattactgtgcaagagaggggggtgggagttcgtttgactactggggccaggga

SEQ ID NO: 3900 - protein, 43 aa, Artificial Sequence
  Description of Artificial Sequence: Synthetic antibody
TINPDTSKNQFSLQLNSVTPKDTAVYYCAREGGGSSFDYWGQG

SEQ ID NO: 3901 - DNA, 129 bp, Artificial Sequence
  Description of Artificial Sequence: Synthetic antibody
accatcaacccgcacacatccaagaaccagttctccctgcagctgaactctgtgactcccgaggacacggctgtgtattactgtgcaagagaggggggtgggagttcgtttgactactggggccaggga

SEQ ID NO: 3902 - protein, 43 aa, Artificial Sequence
  Description of Artificial Sequence: Synthetic antibody
TINPHTSKNQFSLQLNSVTPEDTAVYYCAREGGGSSFDYWGQG

SEQ ID NO: 3903 - DNA, 129 bp, Artificial Sequence
  Description of Artificial Sequence: Synthetic antibody
accatcaacccgcacacatccaagaaccagttctccctgcagctgaactctgtgactcccaaggacacggctgtgtattactgtgcaagagaggggggtgggagttcgtttgactactggggccaggga

SEQ ID NO: 3904 - protein, 43 aa, Artificial Sequence
  Description of Artificial Sequence: Synthetic antibody
TINPHTSKNQFSLQLNSVTPKDTAVYYCAREGGGSSFDYWGQG

SEQ ID NO: 3905 - protein, 13 aa, Artificial Sequence
  Description of Artificial Sequence: Synthetic antibody
CASGYSSSWYDYW

SEQ ID NO: 3906 - DNA, 129 bp, Artificial Sequence
  Description of Artificial Sequence: Synthetic antibody
accatctccatacacaattccaagaacacgctgtatcttcaaatgaacagcctgagagccgaggacacggccgtgtattactgtgcgagcgggtatagcagcagctggtacgattactggggccaggga

SEQ ID NO: 3907 - protein, 43 aa, Artificial Sequence
  Description of Artificial Sequence: Synthetic antibody
TISIHNSKNTLYLQMNSLRAEDTAVYYCASGYSSSWYDYWGQG

SEQ ID NO: 3908 - DNA, 129 bp, Artificial Sequence
  Description of Artificial Sequence: Synthetic antibody
accatctccagagacaattccaagaacacgctgtatcttcaaatgaacagcctgggagccgaggacacggccgtgtattactgtgcgagcgggtatagcagcagctggtacgattactggggccaggga

SEQ ID NO: 3909 - protein, 43 aa, Artificial Sequence
  Description of Artificial Sequence: Synthetic antibody
TISRDNSKNTLYLQMNSLGAEDTAVYYCASGYSSSWYDYWGQG

SEQ ID NO: 3910 - DNA, 129 bp, Artificial Sequence
  Description of Artificial Sequence: Synthetic antibody
accatctccagagacaattccaagaacacgctgtatcttcaaatgaacagcctgagagccgaggacacggccgtgtattactgtgcgagcgggtatagcagcagctggtacgattactggggccaggga

SEQ ID NO: 3911 - protein, 43 aa, Artificial Sequence
  Description of Artificial Sequence: Synthetic antibody
TISRDNSKNTLYLQMNSLRAEDTAVYYCASGYSSSWYDYWGQG

SEQ ID NO: 3912 - DNA, 129 bp, Artificial Sequence
  Description of Artificial Sequence: Synthetic antibody
accatctccagacacaattccaacaacacgctgtatcttcaaatgaacagcctgagagccgaggacacggccgtgtattactgtgcgagcgggtatagcagcagctggtacgattactggggccaggga

SEQ ID NO: 3913 - protein, 43 aa, Artificial Sequence
  Description of Artificial Sequence: Synthetic antibody
TISRHNSNNTLYLQMNSLRAEDTAVYYCASGYSSSWYDYWGQG

SEQ ID NO: 3914 - protein, 24 aa, Artificial Sequence
  Description of Artificial Sequence: Synthetic antibody
CARDSSSWYYESPDFYYYYGMDVW

SEQ ID NO: 3915 - DNA, 129 bp, Artificial Sequence
  Description of Artificial Sequence: Synthetic antibody
tatcttcaaatgaacagcctgagagccgaggacacggccgtgtattactgtgcgagagatagcagcagctggtactatgaatccccggacttctactactactacggtatggacgtctggggccaaggg

SEQ ID NO: 3916 - protein, 43 aa, Artificial Sequence
  Description of Artificial Sequence: Synthetic antibody
YLQMNSLRAEDTAVYYCARDSSSWYYESPDFYYYYGMDVWGQG

SEQ ID NO: 3917 - DNA, 129 bp, Artificial Sequence
  Description of Artificial Sequence: Synthetic antibody
tatattcaaatgaacagcctgagagccgaggacacggccgtgtattactgtgcgagagatagcagcagctggtactatgaatccccggacttctactactactacggtatggacgtctggggccaaggg

SEQ ID NO: 3918 - protein, 43 aa, Artificial Sequence
  Description of Artificial Sequence: Synthetic antibody
YIQMNSLRAEDTAVYYCARDSSSWYYESPDFYYYYGMDVWGQG

SEQ ID NO: 3919 - DNA, 129 bp, Artificial Sequence
  Description of Artificial Sequence: Synthetic antibody
tatattcaaatcaacagcctgagagccgaggacacggccgtgtattactgtgcgagagatagcagcagctggtactatgaatccccggacttctactactactacggtatggacgtctggggccaaggg

SEQ ID NO: 3920 - protein, 43 aa, Artificial Sequence
  Description of Artificial Sequence: Synthetic antibody
YIQINSLRAEDTAVYYCARDSSSWYYESPDFYYYYGMDVWGQG

SEQ ID NO: 3921 - DNA, 129 bp, Artificial Sequence
  Description of Artificial Sequence: Synthetic antibody
tatattaaaatgaacagcctgagagccgaggacacggccgtgtattactgtgcgagagatagcagcagctggtactatgaatccccggacttctactactactacggtatggacgtctggggccaaggg

SEQ ID NO: 3922 - protein, 43 aa, Artificial Sequence
  Description of Artificial Sequence: Synthetic antibody
YIKMNSLRAEDTAVYYCARDSSSWYYESPDFYYYYGMDVWGQG

SEQ ID NO: 3923 - protein, 14 aa, Artificial Sequence
  Description of Artificial Sequence: Synthetic antibody
CARGSGSAGYFDYW

SEQ ID NO: 3924 - DNA, 129 bp, Artificial Sequence
  Description of Artificial Sequence: Synthetic antibody
atctccatacacaattccaagaacacactgtatcttcaaatgaacagcctgagagccgaggacacggccgtgtattactgtgcgagaggaagtggttcggccggatactttgactactggggccaagga

SEQ ID NO: 3925 - protein, 43 aa, Artificial Sequence
  Description of Artificial Sequence: Synthetic antibody
ISIHNSKNTLYLQMNSLRAEDTAVYYCARGSGSAGYFDYWGQG

SEQ ID NO: 3926 - DNA, 129 bp, Artificial Sequence
  Description of Artificial Sequence: Synthetic antibody
atctccagagacaattccaagaacacactgtatcttcaaatgaacagcctgagagccgaggacacggccgtgtattactgtgcgagaggaagtggttcggccggatactttgactactggggccaagga

SEQ ID NO: 3927 - protein, 43 aa, Artificial Sequence
  Description of Artificial Sequence: Synthetic antibody
ISRDNSKNTLYLQMNSLRAEDTAVYYCARGSGSAGYFDYWGQG

SEQ ID NO: 3928 - DNA, 129 bp, Artificial Sequence
  Description of Artificial Sequence: Synthetic antibody
atctccagacacaattccaacaacacactgtatcttcaaatgaacagcctgagagccgaggacacggccgtgtattactgtgcgagaggaagtggttcggccggatactttgactactggggccaagga

SEQ ID NO: 3929 - protein, 43 aa, Artificial Sequence
  Description of Artificial Sequence: Synthetic antibody
ISRHNSNNTLYLQMNSLRAEDTAVYYCARGSGSAGYFDYWGQG

SEQ ID NO: 3930 - DNA, 129 bp, Artificial Sequence
  Description of Artificial Sequence: Synthetic antibody
atctccacagacaattccaacaacacactgtatcttcaaatgaacagcctgagagccgaggacacggccgtgtattactgtgcgagaggaagtggttcggccggatactttgactactggggccaagga

SEQ ID NO: 3931 - protein, 43 aa, Artificial Sequence
  Description of Artificial Sequence: Synthetic antibody
ISTDNSNNTLYLQMNSLRAEDTAVYYCARGSGSAGYFDYWGQG

SEQ ID NO: 3932 - protein, 19 aa, Artificial Sequence
  Description of Artificial Sequence: Synthetic antibody
CAKEFRVRGFGEVPRLDYW

SEQ ID NO: 3933 - DNA, 129 bp, Artificial Sequence
  Description of Artificial Sequence: Synthetic antibody
tcctgggggacgctgtttctgcaaatgagtagcctgagagtcgacgactcggctatttactactgtgcgaaagaatttagggtgagggggttcggggaggtcccccgattggactactggggccaggga

SEQ ID NO: 3934 - protein, 43 aa, Artificial Sequence
  Description of Artificial Sequence: Synthetic antibody
SWGTLFLQMSSLRVDDSAIYYCAKEFRVRGFGEVPRLDYWGQG

SEQ ID NO: 3935 - DNA, 129 bp, Artificial Sequence
  Description of Artificial Sequence: Synthetic antibody
tccagggggacgctgtttctgcaaatgagtagcctgagagtcgacgactcggctatttactactgtgcgaaagaatttagggtgagggggttcggggaggtcccccgattggactactggggccaggga

SEQ ID NO: 3936 - protein, 43 aa, Artificial Sequence
  Description of Artificial Sequence: Synthetic antibody
SRGTLFLQMSSLRVDDSAIYYCAKEFRVRGFGEVPRLDYWGQG

SEQ ID NO: 3937 - DNA, 129 bp, Artificial Sequence
  Description of Artificial Sequence: Synthetic antibody
tccagggggacgctgtttctgcaaatgagtagcctgagaggcgacgactcggctatttactactgtgcgaaagaatttagggtgagggggttcggggaggtcccccgattggactactggggccaggga

SEQ ID NO: 3938 - protein, 43 aa, Artificial Sequence
  Description of Artificial Sequence: Synthetic antibody
SRGTLFLQMSSLRGDDSAIYYCAKEFRVRGFGEVPRLDYWGQG

SEQ ID NO: 3939 - DNA, 129 bp, Artificial Sequence
  Description of Artificial Sequence: Synthetic antibody
tccaagaagacgctgtttctgcaaatgaatagcctgagaggcgaggactcggctatgtattactgtgcgaaagagttcagggtgagggggttcggggaggtaccccgattggactactggggccaggga

SEQ ID NO: 3940 - protein, 43 aa, Artificial Sequence
  Description of Artificial Sequence: Synthetic antibody
SKKTLFLQMNSLRGEDSAMYYCAKEFRVRGFGEVPRLDYWGQG

SEQ ID NO: 3941 - protein, 13 aa, Artificial Sequence
  Description of Artificial Sequence: Synthetic antibody
CAKGEWLVNSDYW

SEQ ID NO: 3942 - DNA, 129 bp, Artificial Sequence
  Description of Artificial Sequence: Synthetic antibody
accatctccatatataattccaagaacacgctgtatctgcaaatgaacagcctgagagccgaggacacggccgtatattactgtgctaagggggagtggctggtaaatagcgactactggggccaggga

SEQ ID NO: 3943 - protein, 43 aa, Artificial Sequence
  Description of Artificial Sequence: Synthetic antibody
TISIYNSKNTLYLQMNSLRAEDTAVYYCAKGEWLVNSDYWGQG

SEQ ID NO: 3944 - DNA, 129 bp, Artificial Sequence
  Description of Artificial Sequence: Synthetic antibody
accatctccatacataattccaagaacacgctgtatctgcaaatgaacagcctgagagccgaggacacggccgtatattactgtgctaagggggagtggctggtaaatagcgactactggggccaggga

SEQ ID NO: 3945 - protein, 43 aa, Artificial Sequence
  Description of Artificial Sequence: Synthetic antibody
TISIHNSKNTLYLQMNSLRAEDTAVYYCAKGEWLVNSDYWGQG

SEQ ID NO: 3946 - DNA, 129 bp, Artificial Sequence
  Description of Artificial Sequence: Synthetic antibody
accatctccagagataattccaagaacacgctgtatctgcaaatgaacagcctgagagccgaggacacggccgtatattactgtgctaagggggagtggctggtaaatagcgactactggggccaggga

SEQ ID NO: 3947 - protein, 43 aa, Artificial Sequence
  Description of Artificial Sequence: Synthetic antibody
TISRDNSKNTLYLQMNSLRAEDTAVYYCAKGEWLVNSDYWGQG

SEQ ID NO: 3948 - DNA, 129 bp, Artificial Sequence
  Description of Artificial Sequence: Synthetic antibody
aacatctccatagataattccaagaacacgctgtatctgcaaatgaacagcctgagagccgaggacacggccgtatattactgtgctaagggggagtggctggtaaatagcgactactggggccaggga

SEQ ID NO: 3949 - protein, 43 aa, Artificial Sequence
  Description of Artificial Sequence: Synthetic antibody
NISIDNSKNTLYLQMNSLRAEDTAVYYCAKGEWLVNSDYWGQG

SEQ ID NO: 3950 - protein, 21 aa, Artificial Sequence
  Description of Artificial Sequence: Synthetic antibody
CAKDQRRSGVNVYYYYGMDVW

SEQ ID NO: 3951 - DNA, 129 bp, Artificial Sequence
  Description of Artificial Sequence: Synthetic antibody
aacacgctgtatctgcaaatgaacagcctgagagccgaggacacggccgtatattactgtgcgaaagatcaacggcggagtggggtcaacgtctactactactacggtatggacgtctggggccaaggg

SEQ ID NO: 3952 - protein, 43 aa, Artificial Sequence
  Description of Artificial Sequence: Synthetic antibody
NTLYLQMNSLRAEDTAVYYCAKDQRRSGVNVYYYYGMDVWGQG

SEQ ID NO: 3953 - DNA, 129 bp, Artificial Sequence
  Description of Artificial Sequence: Synthetic antibody
aacacgatgtatctgcaaatgaacagcctgagagccgagtacacggccgtatattactgtgcgaaagatcaacggcggagtggggtcaacgtctactactactacggtatggacgtctggggccaaggg

SEQ ID NO: 3954 - protein, 43 aa, Artificial Sequence
  Description of Artificial Sequence: Synthetic antibody
NTMYLQMNSLRAEYTAVYYCAKDQRRSGVNVYYYYGMDVWGQG

SEQ ID NO: 3955 - DNA, 129 bp, Artificial Sequence
  Description of Artificial Sequence: Synthetic antibody
aacacgctgtatctgcaaatcaacagcctgagagccgaggacacggccgtatattactgtgcgaaagatcaacggcggagtggggtcaacgtctactactactacggtatggacgtctggggccaaggg

SEQ ID NO: 3956 - protein, 43 aa, Artificial Sequence
  Description of Artificial Sequence: Synthetic antibody
NTLYLQINSLRAEDTAVYYCAKDQRRSGVNVYYYYGMDVWGQG

SEQ ID NO: 3957 - DNA, 129 bp, Artificial Sequence
  Description of Artificial Sequence: Synthetic antibody
aacacgctgtatctccaaatgaacagcctgagagccgaggacacggccgtatattactgtgcgaaagatcaacggcggagtggggtcaacgtctactactactacggtatggacgtctggggccaaggg

SEQ ID NO: 3958 - protein, 16 aa, Artificial Sequence
  Description of Artificial Sequence: Synthetic antibody
CAKERQWLVEPFFDYW

SEQ ID NO: 3959 - DNA, 129 bp, Artificial Sequence
  Description of Artificial Sequence: Synthetic antibody
agagacaattccaagaacatggtttatctgcacatgaacagcctgagagccgacgacacggccgtatattactgtgcgaaagagaggcagtggctggtagagccattttttgactactggggccaggga

SEQ ID NO: 3960 - protein, 43 aa, Artificial Sequence
  Description of Artificial Sequence: Synthetic antibody
RDNSKNMVYLHMNSLRADDTAVYYCAKERQWLVEPFFDYWGQG

SEQ ID NO: 3961 - DNA, 129 bp, Artificial Sequence
  Description of Artificial Sequence: Synthetic antibody
agagacaattccaagaacacgctgtatctgcaaatgaacagcctgagagccgaggacacggccgtatattactgtgcgaaagagaggcagtggctggtagagccattttttgactactggggccaggga

SEQ ID NO: 3962 - protein, 43 aa, Artificial Sequence
  Description of Artificial Sequence: Synthetic antibody
RDNSKNTLYLQMNSLRAEDTAVYYCAKERQWLVEPFFDYWGQG

SEQ ID NO: 3963 - DNA, 129 bp, Artificial Sequence
  Description of Artificial Sequence: Synthetic antibody
agagacaattccaagaacaccctatatctgcagatgaacagcctgagagccgaggacacggccgtctattactgtgcgaaagagaggcagtggctggtagagccattttttgactactggggccaggga

SEQ ID NO: 3964 - DNA, 129 bp, Artificial Sequence
  Description of Artificial Sequence: Synthetic antibody
acagacaattccaagaacacgctgtatctgcaaatgaaccgcctgagagccgaggacacggccgtatattactgtgcgaaagagaggcagtggctggtagagccattttttgactactggggccaggga

SEQ ID NO: 3965 - protein, 43 aa, Artificial Sequence
  Description of Artificial Sequence: Synthetic antibody
TDNSKNTLYLQMNRLRAEDTAVYYCAKERQWLVEPFFDYWGQG

SEQ ID NO: 3966 - protein, 15 aa, Artificial Sequence [sequence omitted]

SEQ ID NO: 3967 - DNA, 129 bp, Artificial Sequence
  Description of Artificial Sequence: Synthetic antibody
tccagagacaatgccaagaactcactgtatctacaaatgaacagcctgagagacgaggacacggctctgtattattgtgcgagagatagacgtgatagtggctacgatatagactactggggccaggga

SEQ ID NO: 3968 - protein, 43 aa, Artificial Sequence
  Description of Artificial Sequence: Synthetic antibody
SRDNAKNSLYLQMNSLRDEDTALYYCARDRRDSGYDIDYWGQG

SEQ ID NO: 3969 - DNA, 129 bp, Artificial Sequence
  Description of Artificial Sequence: Synthetic antibody
tccagagacaatcccaacaactcactgtatctacaaatgaacagcctgagagacgaggacacggctctgtattattgtgcgagagatagacgtgatagtggctacgatatagactactggggccaggga

SEQ ID NO: 3970 - protein, 43 aa, Artificial Sequence
  Description of Artificial Sequence: Synthetic antibody
SRDNPNNSLYLQMNSLRDEDTALYYCARDRRDSGYDIDYWGQG

SEQ ID NO: 3971 - DNA, 129 bp, Artificial Sequence
  Description of Artificial Sequence: Synthetic antibody
tccagacacaatcccaagaactcactgtatctacaaatgaacagcctgagagacgaggacacggctctgtattattgtgcgagagatagacgtgatagtggctacgatatagactactggggccaggga

SEQ ID NO: 3972 - protein, 43 aa, Artificial Sequence
  Description of Artificial Sequence: Synthetic antibody
SRHNPKNSLYLQMNSLRDEDTALYYCARDRRDSGYDIDYWGQG

SEQ ID NO: 3973 - DNA, 129 bp, Artificial Sequence
  Description of Artificial Sequence: Synthetic antibody
tacagagacaatgccaagaactcactgtatctacaaatcaacagcctgagagacgaggacacggctctgtattattgtgcgagagatagacgtgatagtggctacgatatagactactggggccaggga

SEQ ID NO: 3974 - protein, 43 aa, Artificial Sequence
  Description of Artificial Sequence: Synthetic antibody
YRDNAKNSLYLQINSLRDEDTALYYCARDRRDSGYDIDYWGQG

SEQ ID NO: 3975 - protein, 18 aa, Artificial Sequence
  Description of Artificial Sequence: Synthetic antibody
CARGYNWNDWVLGAFDIW

SEQ ID NO: 3976 - DNA, 129 bp, Artificial Sequence
  Description of Artificial Sequence: Synthetic antibody
aattccaagaacacgctgtatcttcaaatgaacagcctgagagccgaggacacggccgtgtattactgtgcgagagggtacaactggaacgactgggtcttaggtgcttttgatatctggggccaaggg

SEQ ID NO: 3977 - protein, 43 aa, Artificial Sequence
  Description of Artificial Sequence: Synthetic antibody
NSKNTLYLQMNSLRAEDTAVYYCARGYNWNDWVLGAFDIWGQG

SEQ ID NO: 3978 - DNA, 129 bp, Artificial Sequence
  Description of Artificial Sequence: Synthetic antibody
aattccaagaacacgctgtatcttcaaatcaacagcctgagagccgaggacacggccgtgtattactgtgcgagagggtacaactggaacgactgggtcttaggtgcttttgatatctggggccaaggg

SEQ ID NO: 3979 - protein, 43 aa, Artificial Sequence
  Description of Artificial Sequence: Synthetic antibody
NSKNTLYLQINSLRAEDTAVYYCARGYNWNDWVLGAFDIWGQG

SEQ ID NO: 3980 - DNA, 129 bp, Artificial Sequence
  Description of Artificial Sequence: Synthetic antibody
aattccaacaacacgatgtatcttcaaatcaacagcctgagagccgaggacacggccgtgtattactgtgcgagagggtacaactggaacgactgggtcttaggtgcttttgatatctggggccaaggg

SEQ ID NO: 3981 - protein, 43 aa, Artificial Sequence
  Description of Artificial Sequence: Synthetic antibody
NSNNTMYLQINSLRAEDTAVYYCARGYNWNDWVLGAFDIWGQG

SEQ ID NO: 3982 - DNA, 129 bp, Artificial Sequence
  Description of Artificial Sequence: Synthetic antibody
aattccaataacacgatttatcttcaaatgaacagcctgagagccgaggacacggccgtgtattactgtgcgagagggtacaactggaacgactgggtcttaggtgcttttgatatctggggccaaggg

SEQ ID NO: 3983 - protein, 43 aa, Artificial Sequence
  Description of Artificial Sequence: Synthetic antibody
NSNNTIYLQMNSLRAEDTAVYYCARGYNWNDWVLGAFDIWGQG

SEQ ID NO: 3984 - protein, 12 aa, Artificial Sequence
  Description of Artificial Sequence: Synthetic antibody
CLRGWSTAMDYW

SEQ ID NO: 3985 - DNA, 129 bp, Artificial Sequence
  Description of Artificial Sequence: Synthetic antibody
ttcaccatctccagagacaacgccaagaacacgctgtatctgcaaatgaacagtctgagagccgaagacacggctctgtattattgtctaagagggtggagtacagctatggattactggggccaggga

SEQ ID NO: 3986 - protein, 43 aa, Artificial Sequence
  Description of Artificial Sequence: Synthetic antibody
FTISRDNAKNTLYLQMNSLRAEDTALYYCLRGWSTAMDYWGQG

SEQ ID NO: 3987 - DNA, 129 bp, Artificial Sequence
  Description of Artificial Sequence: Synthetic antibody
ttcaccatctccagacacaacgccaagaacacgctgtatctgcaaatgaacagtctgagagccgaagacacggctctgtattattgtctaagagggtggagtacagctatggattactggggccaggga

SEQ ID NO: 3988 - protein, 43 aa, Artificial Sequence
  Description of Artificial Sequence: Synthetic antibody
FTISRHNAKNTLYLQMNSLRAEDTALYYCLRGWSTAMDYWGQG

SEQ ID NO: 3989 - DNA, 129 bp, Artificial Sequence
  Description of Artificial Sequence: Synthetic antibody
ttcaccatctccagacacaacgccaagaacacgctgtatctgcaaatgaacagtctgagagccgaacacacggctctgtattattgtctaagagggtggagtacagctatggattactggggccaggga

SEQ ID NO: 3990 - protein, 43 aa, Artificial Sequence
  Description of Artificial Sequence: Synthetic antibody
FTISRHNAKNTLYLQMNSLRAEHTALYYCLRGWSTAMDYWGQG

SEQ ID NO: 3991 - DNA, 129 bp, Artificial Sequence
  Description of Artificial Sequence: Synthetic antibody
ttcaccatctccagacacaaccccaagaacacgctgtatctgcaaatgaacagtctgagagccgaagacacggctctgtattattgtctaagagggtggagtacagctatggattactggggccaggga

SEQ ID NO: 3992 - protein, 43 aa, Artificial Sequence
  Description of Artificial Sequence: Synthetic antibody
FTISRHNPKNTLYLQMNSLRAEDTALYYCLRGWSTAMDYWGQG

SEQ ID NO: 3993 - protein, 25 aa, Artificial Sequence
  Description of Artificial Sequence: Synthetic antibody
CAREPTLTMVRGFVPSYYYYGMDVW

SEQ ID NO: 3994 - DNA, 129 bp, Artificial Sequence
  Description of Artificial Sequence: Synthetic antibody
ttggtgctgaggagcctgagatctgacgacacggccgtgtattactgtgcgagagaaccgaccttgactatggttcggggatttgttccttcctactactactacggtatggacgtctggggccaaggg

SEQ ID NO: 3995 - protein, 43 aa, Artificial Sequence
  Description of Artificial Sequence: Synthetic antibody
LVLRSLRSDDTAVYYCAREPTLTMVRGFVPSYYYYGMDVWGQG

SEQ ID NO: 3996 - DNA, 129 bp, Artificial Sequence
  Description of Artificial Sequence: Synthetic antibody
ttggagctgaggtgcctgagatctgacgacacggccgtgtattactgtgcgagagaaccgaccttgactatggttcggggatttgttccttcctactactactacggtatggacgtctggggccaaggg

SEQ ID NO: 3997 - protein, 43 aa, Artificial Sequence
  Description of Artificial Sequence: Synthetic antibody
LELRCLRSDDTAVYYCAREPTLTMVRGFVPSYYYYGMDVWGQG

SEQ ID NO: 3998 - DNA, 129 bp, Artificial Sequence
  Description of Artificial Sequence: Synthetic antibody
ttggagctgaggagcctgagatctgacgacacggccgtgtattactgtgcgagagaaccgaccttgactatggttcggggatttgttccttcctactactactacggtatggacgtctggggccaaggg

SEQ ID NO: 3999 - protein, 43 aa, Artificial Sequence
  Description of Artificial Sequence: Synthetic antibody
LELRSLRSDDTAVYYCAREPTLTMVRGFVPSYYYYGMDVWGQG

SEQ ID NO: 4000 - DNA, 129 bp, Artificial Sequence
  Description of Artificial Sequence: Synthetic antibody
atggagctgaggagcctgagatctgacgacacggccgtgtattactgtgcgagagaaccgaccttgactatggttcggggatttgttccttcctactactactacggtatggacgtctggggccaaggg

SEQ ID NO: 4001 - protein, 43 aa, Artificial Sequence
  Description of Artificial Sequence: Synthetic antibody
MELRSLRSDDTAVYYCAREPTLTMVRGFVPSYYYYGMDVWGQG

SEQ ID NO: 4002 - protein, 14 aa, Artificial Sequence
  Description of Artificial Sequence: Synthetic antibody
CAKEGRVVAATDYW

SEQ ID NO: 4003 - DNA, 129 bp, Artificial Sequence
  Description of Artificial Sequence: Synthetic antibody
ttctccagagacaattccaacaacacgctgtatctgcaaatgaacagcctgagagccgaggacacggccgtatattactgtgcgaaagaggggcgcgtggtagctgctacagactactggggccaggga

SEQ ID NO: 4004 - protein, 43 aa, Artificial Sequence
  Description of Artificial Sequence: Synthetic antibody
FSRDNSNNTLYLQMNSLRAEDTAVYYCAKEGRVVAATDYWGQG

SEQ ID NO: 4005 - DNA, 129 bp, Artificial Sequence
  Description of Artificial Sequence: Synthetic antibody
atctccagagacaattccaagaacacgctgtatctgcaaatgaacagcctgagagccgaggacacggccgtatattactgtgcgaaagaggggcgcgtggtagctgctacagactactggggccaggga

SEQ ID NO: 4006 - protein, 43 aa, Artificial Sequence
  Description of Artificial Sequence: Synthetic antibody
ISRDNSKNTLYLQMNSLRAEDTAVYYCAKEGRVVAATDYWGQG

SEQ ID NO: 4007 - DNA, 129 bp, Artificial Sequence
  Description of Artificial Sequence: Synthetic antibody
atctccagacacaattccaacaacacgctgtatctgcaaatgaacagcctgagagccgaggacacggccgtatattactgtgcgaaagaggggcgcgtggtagctgctacagactactggggccaggga

SEQ ID NO: 4008 - protein, 43 aa, Artificial Sequence
  Description of Artificial Sequence: Synthetic antibody
ISRHNSNNTLYLQMNSLRAEDTAVYYCAKEGRVVAATDYWGQG

SEQ ID NO: 4009 - DNA, 129 bp, Artificial Sequence
  Description of Artificial Sequence: Synthetic antibody
atctccacacacaattccaagaacacgctgtatctgcaaatgaacagcctgagagccgaggacacggccgtatattactgtgcgaaagaggggcgcgtggtagctgctacagactactggggccaggga

SEQ ID NO: 4010 - protein, 43 aa, Artificial Sequence
  Description of Artificial Sequence: Synthetic antibody
ISTHNSKNTLYLQMNSLRAEDTAVYYCAKEGRVVAATDYWGQG

SEQ ID NO: 4011 - protein, 13 aa, Artificial Sequence
  Description of Artificial Sequence: Synthetic antibody
CARDLEGGYFDYW

SEQ ID NO: 4012 - DNA, 129 bp, Artificial Sequence
  Description of Artificial Sequence: Synthetic antibody
tacatgaccagggacacgtccacgagcacagtctacatggagctgagcagcctgagatctgaggacacggccgtgtattactgtgcgagagatctggaggggggttactttgactactggggccaggga

SEQ ID NO: 4013 - protein, 43 aa, Artificial Sequence
  Description of Artificial Sequence: Synthetic antibody
YMTRDTSTSTVYMELSSLRSEDTAVYYCARDLEGGYFDYWGQG

SEQ ID NO: 4014 - DNA, 129 bp, Artificial Sequence
  Description of Artificial Sequence: Synthetic antibody
accatgacccggcacacgtccacgagcacagtctacatggagctgagcagcctgagatctgaggacacggccgtgtattactgtgcgagagatctggaggggggttactttgactactggggccaggga

SEQ ID NO: 4015 - protein, 43 aa, Artificial Sequence
  Description of Artificial Sequence: Synthetic antibody
TMTRHTSTSTVYMELSSLRSEDTAVYYCARDLEGGYFDYWGQG

SEQ ID NO: 4016 - DNA, 129 bp, Artificial Sequence
  Description of Artificial Sequence: Synthetic antibody
accatgaccagggacacgtccacgagcacagtctacatggagctgagcagcctgagatctgaggacacggccgtgtattactgtgcgagagatctggaggggggttactttgactactggggccaggga

SEQ ID NO: 4017 - protein, 43 aa, Artificial Sequence
  Description of Artificial Sequence: Synthetic antibody
TMTRDTSTSTVYMELSSLRSEDTAVYYCARDLEGGYFDYWGQG

SEQ ID NO: 4018 - DNA, 129 bp, Artificial Sequence
  Description of Artificial Sequence: Synthetic antibody
accatgaccaggcacacgtccacgagcacagtctacatggagctgagcagcctgagatctgaggacacggccgtgtattactgtgcgagagatctggaggggggttactttgactactggggccaggga

SEQ ID NO: 4019 - protein, 20 aa, Artificial Sequence
  Description of Artificial Sequence: Synthetic antibody
CARGRWLTVPYDYYYGLDVW

SEQ ID NO: 4020 - DNA, 129 bp, Artificial Sequence
  Description of Artificial Sequence: Synthetic antibody
atgaaccagttctccctgatgctggattctctgaccgccgcggacacggccgtatattactgtgcgagggggcggtggctgacggtaccgtatgactactattacggtctggacgtctggggccaaggg

SEQ ID NO: 4021 - protein, 43 aa, Artificial Sequence
  Description of Artificial Sequence: Synthetic antibody
MNQFSLMLDSLTAADTAVYYCARGRWLTVPYDYYYGLDVWGQG

SEQ ID NO: 4022 - DNA, 129 bp, Artificial Sequence
  Description of Artificial Sequence: Synthetic antibody
aagaaccagttctccctgaagctggattctctgaccgccgcggacgcggccgtatattactgtgcgagggggcggtggctgacggtaccgtatgactactattacggtctggacgtctggggccaaggg

SEQ ID NO: 4023 - protein, 43 aa, Artificial Sequence
  Description of Artificial Sequence: Synthetic antibody
KNQFSLKLDSLTAADAAVYYCARGRWLTVPYDYYYGLDVWGQG

SEQ ID NO: 4024 - DNA, 129 bp, Artificial Sequence
  Description of Artificial Sequence: Synthetic antibody
aagaaccagttctccctgaagctggattctctgaccgccgcggacacggccgtatattactgtgcgagggggcggtggctgacggtaccgtatgactactattacggtctggacgtctggggccaaggg

SEQ ID NO: 4025 - protein, 43 aa, Artificial Sequence
  Description of Artificial Sequence: Synthetic antibody
KNQFSLKLDSLTAADTAVYYCARGRWLTVPYDYYYGLDVWGQG

SEQ ID NO: 4026 - DNA, 129 bp, Artificial Sequence
  Description of Artificial Sequence: Synthetic antibody
aacaaccagttctccctgacgctggattctctgaccgccgcggacacggccgtatattactgtgcgagggggcggtggctgacggtaccgtatgactactattacggtctggacgtctggggccaaggg

SEQ ID NO: 4027 - protein, 43 aa, Artificial Sequence
  Description of Artificial Sequence: Synthetic antibody
NNQFSLTLDSLTAADTAVYYCARGRWLTVPYDYYYGLDVWGQG

SEQ ID NO: 4028 - protein, 15 aa, Artificial Sequence
  Description of Artificial Sequence: Synthetic antibody
CVRERGPGEPCFDCW

SEQ ID NO: 4029 - DNA, 129 bp, Artificial Sequence
  Description of Artificial Sequence: Synthetic antibody
tcaagatatcattcaaagagctctctgtatctgcaaatgagcagcgtgaaaaccgaggacacggccgtctattactgtgttagagagaggggaccgggggagccgtgctttgactgctggggccaggga

SEQ ID NO: 4030 - protein, 43 aa, Artificial Sequence
  Description of Artificial Sequence: Synthetic antibody
SRYHSKSSLYLQMSSVKTEDTAVYYCVRERGPGEPCFDCWGQG

SEQ ID NO: 4031 - DNA, 129 bp, Artificial Sequence
  Description of Artificial Sequence: Synthetic antibody
tcaagagattattcaaagagctctctgtatctgcaaatgagcagcgtgaaaaccgaggacacggccgtctattactgtgttagagagaggggaccgggggagccgtgctttgactgctggggccaggga

SEQ ID NO: 4032 - protein, 43 aa, Artificial Sequence
  Description of Artificial Sequence: Synthetic antibody
SRDYSKSSLYLQMSSVKTEDTAVYYCVRERGPGEPCFDCWGQG

SEQ ID NO: 4033 - DNA, 129 bp, Artificial Sequence
  Description of Artificial Sequence: Synthetic antibody
tcaagagatgattcaaagagctctctgtatctgcaaatgagcagcgtgaaaaccgaggacacggccgtctattactgtgttagagagaggggaccgggggagccgtgctttgactgctggggccaggga

SEQ ID NO: 4034 - protein, 43 aa, Artificial Sequence
  Description of Artificial Sequence: Synthetic antibody
SRDDSKSSLYLQMSSVKTEDTAVYYCVRERGPGEPCFDCWGQG

SEQ ID NO: 4035 - DNA, 129 bp, Artificial Sequence
  Description of Artificial Sequence: Synthetic antibody
tcaagagatcattcaaagagctctctgtatctgcaaatgagcagcgtgaaaaccgaggacacggccgtctattactgtgttagagagaggggaccgggggagccgtgctttgactgctggggccaggga

SEQ ID NO: 4036 - protein, 43 aa, Artificial Sequence
  Description of Artificial Sequence: Synthetic antibody
SRDHSKSSLYLQMSSVKTEDTAVYYCVRERGPGEPCFDCWGQG

SEQ ID NO: 4037 - protein, 19 aa, Artificial Sequence
  Description of Artificial Sequence: Synthetic antibody
CAKEFRVRGCGEVPRLDYW

SEQ ID NO: 4038 - DNA, 129 bp, Artificial Sequence
  Description of Artificial Sequence: Synthetic antibody
tcctgggggacgctgtttctccaaatgagtagcctgagaggcgacgactcggctatttactactgtgcgaaagaatttagggtgagggggtgcggggaggtcccccgattggactactggggccaggga

SEQ ID NO: 4039 - protein, 43 aa, Artificial Sequence
  Description of Artificial Sequence: Synthetic antibody
SWGTLFLQMSSLRGDDSAIYYCAKEFRVRGCGEVPRLDYWGQG

SEQ ID NO: 4040 - DNA, 129 bp, Artificial Sequence
  Description of Artificial Sequence: Synthetic antibody
tccagggggacgctgtttctgcaaatgagtagcctgagagtcgacgactcggctatttactactgtgcgaaagaatttagggtgagggggtgcggggaggtcccccgattggactactggggccaggga

SEQ ID NO: 4041 - protein, 43 aa, Artificial Sequence
  Description of Artificial Sequence: Synthetic antibody
SRGTLFLQMSSLRVDDSAIYYCAKEFRVRGCGEVPRLDYWGQG

SEQ ID NO: 4042 - DNA, 129 bp, Artificial Sequence
  Description of Artificial Sequence: Synthetic antibody
tccaagaagacgctgtttctgcaaatgaatagcctgagaggcgaggactcggctatgtattactgtgcgaaagagttccgggtgagggggtgcggggaggtaccccgattggactactggggccaggga

SEQ ID NO: 4043 - protein, 43 aa, Artificial Sequence
  Description of Artificial Sequence: Synthetic antibody
SKKTLFLQMNSLRGEDSAMYYCAKEFRVRGCGEVPRLDYWGQG

SEQ ID NO: 4044 - DNA, 129 bp, Artificial Sequence
  Description of Artificial Sequence: Synthetic antibody
tccaagaagacgctgtttctgcaaatgaatagcctgagaggcgaggactcggctatgtattactgtgcgaaagagttcagggtgagggggtgcggggaggtaccccgattggactactggggccaggga

SEQ ID NO: 4045 - protein, 12 aa, Artificial Sequence
  Description of Artificial Sequence: Synthetic antibody
CTSRRIPDPDYW

SEQ ID NO: 4046 - DNA, 129 bp, Artificial Sequence
  Description of Artificial Sequence: Synthetic antibody
ttcaccatctccatagattattcaaagaacacggcgtatctgcaaatgaacagcctgaaaaccgaggacacggccgtgtattactgtactagccgacggatacctgacccggactactggggccaggga

SEQ ID NO: 4047 - protein, 43 aa, Artificial Sequence
  Description of Artificial Sequence: Synthetic antibody
FTISIDYSKNTAYLQMNSLKTEDTAVYYCTSRRIPDPDYWGQG

SEQ ID NO: 4048 - DNA, 129 bp, Artificial Sequence
  Description of Artificial Sequence: Synthetic antibody
ttcaccatctccagatatgattcaaagaacacggcgtatctgcaaatgaacagcctgaaacccgaggacacggccgtgtattactgtactagccgacggatacctgacccggactactggggccaggga

SEQ ID NO: 4049 - protein, 43 aa, Artificial Sequence
  Description of Artificial Sequence: Synthetic antibody
FTISRYDSKNTAYLQMNSLKPEDTAVYYCTSRRIPDPDYWGQG

SEQ ID NO: 4050 - DNA, 129 bp, Artificial Sequence
  Description of Artificial Sequence: Synthetic antibody
ttcaccatctccagatatgattcaaagaacacggcgtatctgaaaatgaacagcctgaaaaccgaggacacggccgtgtattactgtactagccgacggatacctgacccggactactggggccaggga

SEQ ID NO: 4051 - protein, 43 aa, Artificial Sequence
  Description of Artificial Sequence: Synthetic antibody
FTISRYDSKNTAYLKMNSLKTEDTAVYYCTSRRIPDPDYWGQG

SEQ ID NO: 4052 - DNA, 129 bp, Artificial Sequence
  Description of Artificial Sequence: Synthetic antibody
ttcaccatctccagagatgattcaaagaacacggcgtatctgcaaatgaacagcctgaaaaccgaggacacggccgtgtattactgtactagccgacggatacctgacccggactactggggccaggga

SEQ ID NO: 4053 - protein, 43 aa, Artificial Sequence
  Description of Artificial Sequence: Synthetic antibody
FTISRDDSKNTAYLQMNSLKTEDTAVYYCTSRRIPDPDYWGQG

SEQ ID NO: 4054 - protein, 13 aa, Artificial Sequence
  Description of Artificial Sequence: Synthetic antibody
CARARSGYYIDYW

SEQ ID NO: 4055 - DNA, 129 bp, Artificial Sequence
  Description of Artificial Sequence: Synthetic antibody
tccatctccatagaaaatgccaagaactccttgtatcttcaaatgaacagcctgagagccggggacacggctgtgtattactgtgcaagagcgcggagtggttattacattgactactggggccaggga

SEQ ID NO: 4056 - protein, 43 aa, Artificial Sequence
  Description of Artificial Sequence: Synthetic antibody
SISIENAKNSLYLQMNSLRAGDTAVYYCARARSGYYIDYWGQG

SEQ ID NO: 4057 - DNA, 129 bp, Artificial Sequence
  Description of Artificial Sequence: Synthetic antibody
accatctccagagaaaatgccaagaactccttgtatcttcaaatgaacagcctgagagccggggacacggctgtgtattactgtgcaagagcgcggagtggttattacattgactactggggccaggga

SEQ ID NO: 4058 - protein, 43 aa, Artificial Sequence
  Description of Artificial Sequence: Synthetic antibody
TISRENAKNSLYLQMNSLRAGDTAVYYCARARSGYYIDYWGQG

SEQ ID NO: 4059 - DNA, 129 bp, Artificial Sequence
  Description of Artificial Sequence: Synthetic antibody
aacatctccatagaaaatgccaagaactccttgtatcttcaaatgaacagcctgagagccggggacacggctgtgtattactgtgcaagagcgcggagtggttattacattgactactggggccaggga

SEQ ID NO: 4060 - protein, 43 aa, Artificial Sequence
  Description of Artificial Sequence: Synthetic antibody
NISIENAKNSLYLQMNSLRAGDTAVYYCARARSGYYIDYWGQG

SEQ ID NO: 4061 - DNA, 129 bp, Artificial Sequence
  Description of Artificial Sequence: Synthetic antibody
aacatctccagagaaaatgccaagaactccttgtatcttcaaatgaacagcctgagagccggtgacacggctgtgtattactgtgcaagagcgcggagtggttattacattgactactggggccaggga

SEQ ID NO: 4062 - protein, 43 aa, Artificial Sequence
  Description of Artificial Sequence: Synthetic antibody
NISRENAKNSLYLQMNSLRAGDTAVYYCARARSGYYIDYWGQG

SEQ ID NO: 4063 - protein, 22 aa, Artificial Sequence
  Description of Artificial Sequence: Synthetic antibody
CARESDAVGATVTNYYYGMDVW

SEQ ID NO: 4064 - DNA, 129 bp, Artificial Sequence
  Description of Artificial Sequence: Synthetic antibody
tcgctgtatcttcaaatgaccagcctgagagccgaggacacggccgtgtattactgtgcgagagagtccgacgccgtgggggctacggttacaaattactactacggtatggacgtctggggccaaggg

SEQ ID NO: 4065 - protein, 43 aa, Artificial Sequence
  Description of Artificial Sequence: Synthetic antibody
SLYLQMTSLRAEDTAVYYCARESDAVGATVTNYYYGMDVWGQG

SEQ ID NO: 4066 - DNA, 129 bp, Artificial Sequence
  Description of Artificial Sequence: Synthetic antibody
tcgatgtatcttcaaatgaacagcctgagagccgaggacacggccgtgtattactgtgcgagagagtccgacgccgtgggggctacggttacaaattactactacggtatggacgtctggggccaaggg

SEQ ID NO: 4067 - protein, 43 aa, Artificial Sequence
  Description of Artificial Sequence: Synthetic antibody
SMYLQMNSLRAEDTAVYYCARESDAVGATVTNYYYGMDVWGQG

SEQ ID NO: 4068 - DNA, 129 bp, Artificial Sequence
  Description of Artificial Sequence: Synthetic antibody
acgctgtatcttcaaatgaacagcctgagagccgaggacacggccgtgtattactgtgcgagagagtccgacgccgtgggggctacggttacaaattactactacggtatggacgtctggggccaaggg

SEQ ID NO: 4069 - protein, 43 aa, Artificial Sequence
  Description of Artificial Sequence: Synthetic antibody
TLYLQMNSLRAEDTAVYYCARESDAVGATVTNYYYGMDVWGQG

SEQ ID NO: 4070 - DNA, 129 bp, Artificial Sequence
  Description of Artificial Sequence: Synthetic antibody
acgatgtatcttcaaatcaacagcctgagagccgaggacacggccgtgtattactgtgcgagagagtccgacgccgtgggggctacggttacaaattactactacggtatggacgtctggggccaaggg

SEQ ID NO: 4071 - protein, 43 aa, Artificial Sequence
  Description of Artificial Sequence: Synthetic antibody
TMYLQINSLRAEDTAVYYCARESDAVGATVTNYYYGMDVWGQG

SEQ ID NO: 4072 - protein, 14 aa, Artificial Sequence
  Description of Artificial Sequence: Synthetic antibody
CAKVVGILTGYFDW

SEQ ID NO: 4073 - DNA, 129 bp, Artificial Sequence
  Description of Artificial Sequence: Synthetic antibody
atctccatatacaattccaagaacacgctgtatctgcaaatgaacagcctgagagccgaggacacggccgtatattactgtgcgaaagttgttggtattttgactggttatttcgactggggccaggga

SEQ ID NO: 4074 - protein, 43 aa, Artificial Sequence
  Description of Artificial Sequence: Synthetic antibody
ISIYNSKNTLYLQMNSLRAEDTAVYYCAKVVGILTGYFDWGQG

SEQ ID NO: 4075 - DNA, 129 bp, Artificial Sequence
  Description of Artificial Sequence: Synthetic antibody
atctccatacacaattccaagaacacgctgtatctgcaaatgaacagcctgagagccgaggacacggccgtatattactgtgcgaaagttgttggtattttgactggttatttcgactggggccaggga

SEQ ID NO: 4076 - protein, 43 aa, Artificial Sequence
  Description of Artificial Sequence: Synthetic antibody
ISIHNSKNTLYLQMNSLRAEDTAVYYCAKVVGILTGYFDWGQG

SEQ ID NO: 4077 - DNA, 129 bp, Artificial Sequence
  Description of Artificial Sequence: Synthetic antibody
atctccagagacaattccaagaacacgctgtatctgcaaatgaacagcctgagagccgaggacacggccgtatattactgtgcgaaagttgttggtattttgactggttatttcgactggggccaggga

SEQ ID NO: 4078 - protein, 43 aa, Artificial Sequence
  Description of Artificial Sequence: Synthetic antibody
ISRDNSKNTLYLQMNSLRAEDTAVYYCAKVVGILTGYFDWGQG

SEQ ID NO: 4079 - DNA, 129 bp, Artificial Sequence
  Description of Artificial Sequence: Synthetic antibody
atctccagacacaattccaacaacacgctgtatctgcaaatgaacagcctgagagccgaggacacggccgtatattactgtgcgaaagttgttggtattttgactggttatttcgactggggccaggga

SEQ ID NO: 4080 - protein, 43 aa, Artificial Sequence
  Description of Artificial Sequence: Synthetic antibody
ISRHNSNNTLYLQMNSLRAEDTAVYYCAKVVGILTGYFDWGQG

SEQ ID NO: 4081 - protein, 12 aa, Artificial Sequence
  Description of Artificial Sequence: Synthetic antibody
CAKDRLRSSDYW

SEQ ID NO: 4082 - DNA, 129 bp, Artificial Sequence
  Description of Artificial Sequence: Synthetic antibody
ttcaccatctccagagacaattccaagagcactctatatctgcaaatgagcagcctgagagccgaggacacggccgtatattactgtgcgaaagatcgcctacggtcctcagactactggggcccggga

SEQ ID NO: 4083 - protein, 43 aa, Artificial Sequence
  Description of Artificial Sequence: Synthetic antibody
FTISRDNSKSTLYLQMSSLRAEDTAVYYCAKDRLRSSDYWGPG

SEQ ID NO: 4084 - DNA, 129 bp, Artificial Sequence
  Description of Artificial Sequence: Synthetic antibody
ttcaccatctccagagacaattccaagaacacactatatctgcaaatgagcagcctgagagccgaggacacggccgtatattactgtgcgaaagatcgcctacggtcctcagactactggggccaggga

SEQ ID NO: 4085 - protein, 43 aa, Artificial Sequence
  Description of Artificial Sequence: Synthetic antibody
FTISRDNSKNTLYLQMSSLRAEDTAVYYCAKDRLRSSDYWGQG

SEQ ID NO: 4086 - DNA, 129 bp, Artificial Sequence
  Description of Artificial Sequence: Synthetic antibody
ttcaccatctccagacacaattccaagagcactctatatctgcaaatgagcagcctgagagccgaggacacggccgtatattactgtgcgaaagatcgcctacggtcctcagactactggggcccggga

SEQ ID NO: 4087 - protein, 43 aa, Artificial Sequence
  Description of Artificial Sequence: Synthetic antibody
FTISRHNSKSTLYLQMSSLRAEDTAVYYCAKDRLRSSDYWGPG

SEQ ID NO: 4088 - DNA, 129 bp, Artificial Sequence
  Description of Artificial Sequence: Synthetic antibody
ttcaccatctccagacacaattccaagaacacaatatatctgcaaatgagcagcctgagagccgaggacacggccgtatattactgtgcgaaagatcgcctacggtcctcagactactggggccaggga

SEQ ID NO: 4089 - protein, 43 aa, Artificial Sequence
  Description of Artificial Sequence: Synthetic antibody
FTISRHNSKNTIYLQMSSLRAEDTAVYYCAKDRLRSSDYWGQG

SEQ ID NO: 4090 - protein, 14 aa, Artificial Sequence
  Description of Artificial Sequence: Synthetic antibody
CAKGPLVGWYFDLW

SEQ ID NO: 4091 - DNA, 129 bp, Artificial Sequence
  Description of Artificial Sequence: Synthetic antibody
ttctccagatataattccaagaacacgctgtatctgcaaatgaacagcctgagagccgaggacacggccgtatattactgtgcgaaaggacctctcgtaggctggtacttcgatctctggggccgtggc

SEQ ID NO: 4092 - protein, 43 aa, Artificial Sequence
  Description of Artificial Sequence: Synthetic antibody
FSRYNSKNTLYLQMNSLRAEDTAVYYCAKGPLVGWYFDLWGRG

SEQ ID NO: 4093 - DNA, 129 bp, Artificial Sequence
  Description of Artificial Sequence: Synthetic antibody
atctccatatataattccaagaacacgctgtatctgcaaatgaacagcctgagagccgaggacacggccgtatattactgtgcgaaaggacctctcgtaggctggtacttcgatctctggggccgtggc

SEQ ID NO: 4094 - protein, 43 aa, Artificial Sequence
  Description of Artificial Sequence: Synthetic antibody
ISIYNSKNTLYLQMNSLRAEDTAVYYCAKGPLVGWYFDLWGRG

SEQ ID NO: 4095 - DNA, 129 bp, Artificial Sequence
  Description of Artificial Sequence: Synthetic antibody
atctccatacataattccaagaacacgctgtatctgcaaatgaacagcctgagagccgaggacacggccgtatattactgtgcgaaaggacctctcgtaggctggtacttcgatctctggggccgtggc

SEQ ID NO: 4096 - protein, 43 aa, Artificial Sequence
  Description of Artificial Sequence: Synthetic antibody
ISIHNSKNTLYLQMNSLRAEDTAVYYCAKGPLVGWYFDLWGRG

SEQ ID NO: 4097 - DNA, 129 bp, Artificial Sequence
  Description of Artificial Sequence: Synthetic antibody
atctccagagataattccaagaacacgctgtatctgcaaatgaacagcctgagagccgaggacacggccgtatattactgtgcgaaaggacctctcgtaggctggtacttcgatctctggggccgtggc

SEQ ID NO: 4098 - protein, 43 aa, Artificial Sequence
  Description of Artificial Sequence: Synthetic antibody
ISRDNSKNTLYLQMNSLRAEDTAVYYCAKGPLVGWYFDLWGRG

SEQ ID NO: 4099 - protein, 17 aa, Artificial Sequence
  Description of Artificial Sequence: Synthetic antibody
CANSQDYDSSGYYPDYW

SEQ ID NO: 4100 - DNA, 129 bp, Artificial Sequence
  Description of Artificial Sequence: Synthetic antibody
tacaattccaacaacacgctgtatctgcaaatgaacagcctgagagccgaggacacggccgtatattactgtgcgaactcgcaggactatgatagtagtggttattaccccgactactggggccaggga

SEQ ID NO: 4101 - protein, 43 aa, Artificial Sequence
  Description of Artificial Sequence: Synthetic antibody
YNSNNTLYLQMNSLRAEDTAVYYCANSQDYDSSGYYPDYWGQG

SEQ ID NO: 4102 - DNA, 129 bp, Artificial Sequence
  Description of Artificial Sequence: Synthetic antibody
gacaattccaagaacacgctgtatctgcaaatgaacagcctgagagccgaggacacggccgtatattactgtgcgaactcgcaggactatgatagtagtggttattaccccgactactggggccaggga

SEQ ID NO: 4103 - protein, 43 aa, Artificial Sequence
  Description of Artificial Sequence: Synthetic antibody
DNSKNTLYLQMNSLRAEDTAVYYCANSQDYDSSGYYPDYWGQG

SEQ ID NO: 4104 - DNA, 129 bp, Artificial Sequence
  Description of Artificial Sequence: Synthetic antibody
gacaataccaacaacacgctgtatctgcaaatgaacagcctgagagccgaggacacggccgtatattactgtgcgaactcgcaggactatgatagtagtggttattaccccgactactggggccaggga

SEQ ID NO: 4105 - protein, 43 aa, Artificial Sequence
  Description of Artificial Sequence: Synthetic antibody
DNTNNTLYLQMNSLRAEDTAVYYCANSQDYDSSGYYPDYWGQG

SEQ ID NO: 4106 - DNA, 129 bp, Artificial Sequence
  Description of Artificial Sequence: Synthetic antibody
gaaaattccaacaacacgctgtatctgcaaatgaacagcctgagagccgaggacacggccgtatattactgtgcgaactcgcaggactatgatagtagtggttattaccccgactactggggccaggga

SEQ ID NO: 4107 - protein, 43 aa, Artificial Sequence
  Description of Artificial Sequence: Synthetic antibody
ENSNNTLYLQMNSLRAEDTAVYYCANSQDYDSSGYYPDYWGQG

SEQ ID NO: 4108 - protein, 16 aa, Artificial Sequence
  Description of Artificial Sequence: Synthetic antibody
CAKTRHYGDYWYFDLW

SEQ ID NO: 4109 - DNA, 129 bp, Artificial Sequence
  Description of Artificial Sequence: Synthetic antibody
ttagataattccaagaacacgctgcatctgcaaatgaacagcctgagagccgacgacacggccgtatattactgtgcgaaaactagacactacggtgactactggtacttcgatctctggggccgtggc

SEQ ID NO: 4110 - protein, 43 aa, Artificial Sequence
  Description of Artificial Sequence: Synthetic antibody
LDNSKNTLHLQMNSLRADDTAVYYCAKTRHYGDYWYFDLWGRG

SEQ ID NO: 4111 - DNA, 129 bp, Artificial Sequence
  Description of Artificial Sequence: Synthetic antibody
atatataattccaagaacacgctgcatctgcaaatgaacagcctgagagccgacgacacggccgtatattactgtgcgaaaactagacactacggtgactactggtacttcgatctctggggccgtggc

SEQ ID NO: 4112 - protein, 43 aa, Artificial Sequence
  Description of Artificial Sequence: Synthetic antibody
IYNSKNTLHLQMNSLRADDTAVYYCAKTRHYGDYWYFDLWGRG

SEQ ID NO: 4113 - DNA, 129 bp, Artificial Sequence
  Description of Artificial Sequence: Synthetic antibody
atagataattccaacaacacgctgcatctgcaaatgaacagcctgagagccgacgacacggccgtatattactgtgcgaaaactagacactacggtgactactggtacttcgatctctggggccgtggc

SEQ ID NO: 4114 - protein, 43 aa, Artificial Sequence
  Description of Artificial Sequence: Synthetic antibody
IDNSNNTLHLQMNSLRADDTAVYYCAKTRHYGDYWYFDLWGRG

SEQ ID NO: 4115 - DNA, 129 bp, Artificial Sequence
  Description of Artificial Sequence: Synthetic antibody
agagataattccaagaacacgctgcatctgcaaatgaacagcctgagagccgacgacacggccgtatattactgtgcgaaaactagacactacggtgactactggtacttcgatctctggggccgtggc

SEQ ID NO: 4116 - protein, 43 aa, Artificial Sequence
  Description of Artificial Sequence: Synthetic antibody
RDNSKNTLHLQMNSLRADDTAVYYCAKTRHYGDYWYFDLWGRG

SEQ ID NO: 4117 - protein, 13 aa, Artificial Sequence
  Description of Artificial Sequence: Synthetic antibody
CAKDRRFGEFDPW

SEQ ID NO: 4118 - DNA, 129 bp, Artificial Sequence
  Description of Artificial Sequence: Synthetic antibody
accatctccatatataattccaagaacacgctgtatctgcaaatgaacagcctgagagccgaggacacggccgtatattactgtgcgaaagatcggaggttcggggagttcgacccctggggccaggga

SEQ ID NO: 4119 - protein, 43 aa, Artificial Sequence
  Description of Artificial Sequence: Synthetic antibody
TISIYNSKNTLYLQMNSLRAEDTAVYYCAKDRRFGEFDPWGQG

SEQ ID NO: 4120 - DNA, 129 bp, Artificial Sequence
  Description of Artificial Sequence: Synthetic antibody
accatctccatacataattccaagaacacgctgtatctgcaaatgaacagcctgagagccgaggacacggccgtatattactgtgcgaaagatcggaggttcggggagttcgacccctggggccaggga

SEQ ID NO: 4121 - protein, 43 aa, Artificial Sequence
  Description of Artificial Sequence: Synthetic antibody
TISIHNSKNTLYLQMNSLRAEDTAVYYCAKDRRFGEFDPWGQG

SEQ ID NO: 4122 - DNA, 129 bp, Artificial Sequence
  Description of Artificial Sequence: Synthetic antibody
accatctccagagataattccaagaacacgctgtatctgcaaatgaacagcctgagagccgaggacacggccgtatattactgtgcgaaagatcggaggttcggggagttcgacccctggggccaggga

SEQ ID NO: 4123 - protein, 43 aa, Artificial Sequence
  Description of Artificial Sequence: Synthetic antibody
TISRDNSKNTLYLQMNSLRAEDTAVYYCAKDRRFGEFDPWGQG

SEQ ID NO: 4124 - DNA, 129 bp, Artificial Sequence
  Description of Artificial Sequence: Synthetic antibody
aacatctccatagataattccaagaacacgctgtatctgcaaatgaacagcctgagagccgaggacacggccgtatattactgtgcgaaagatcggaggttcggggagttcgacccctggggccaggga

SEQ ID NO: 4125 - protein, 43 aa, Artificial Sequence
  Description of Artificial Sequence: Synthetic antibody
NISIDNSKNTLYLQMNSLRAEDTAVYYCAKDRRFGEFDPWGQG

SEQ ID NO: 4126 - protein, 13 aa, Artificial Sequence
  Description of Artificial Sequence: Synthetic antibody
CAKGRSSSWYDYW

SEQ ID NO: 4127 - DNA, 129 bp, Artificial Sequence
  Description of Artificial Sequence: Synthetic antibody
accatctccatatacaattccaagaacacgctgtatctgcaaatgaacagcctgagagccgaggacacggccgtatattactgtgcgaaagggcgtagcagcagctggtacgactactggggccaggga

SEQ ID NO: 4128 - protein, 43 aa, Artificial Sequence
  Description of Artificial Sequence: Synthetic antibody
TISIYNSKNTLYLQMNSLRAEDTAVYYCAKGRSSSWYDYWGQG

SEQ ID NO: 4129 - DNA, 129 bp, Artificial Sequence
  Description of Artificial Sequence: Synthetic antibody
accatctccatacacaattccaagaacacgctgtatctgcaaatgaacagcctgagagccgaggacacggccgtatattactgtgcgaaagggcgtagcagcagctggtacgactactggggccaggga

SEQ ID NO: 4130 - protein, 43 aa, Artificial Sequence
  Description of Artificial Sequence: Synthetic antibody
TISIHNSKNTLYLQMNSLRAEDTAVYYCAKGRSSSWYDYWGQG

SEQ ID NO: 4131 - DNA, 129 bp, Artificial Sequence
  Description of Artificial Sequence: Synthetic antibody
accatctccagagacaattccaagaacacgctgtatctgcaaatgaacagcctgagagccgaggacacggccgtatattactgtgcgaaagggcgtagcagcagctggtacgactactggggccaggga

SEQ ID NO: 4132 - protein, 43 aa, Artificial Sequence
  Description of Artificial Sequence: Synthetic antibody
TISRDNSKNTLYLQMNSLRAEDTAVYYCAKGRSSSWYDYWGQG

SEQ ID NO: 4133 - DNA, 129 bp, Artificial Sequence
  Description of Artificial Sequence: Synthetic antibody
accatctccagacacaattccaacaacacgctgtatctgcaaatgaacagcctgagagccgaggacacggccgtatattactgtgcgaaagggcgtagcagcagctggtacgactactggggccaggga

SEQ ID NO: 4134 - protein, 43 aa, Artificial Sequence
  Description of Artificial Sequence: Synthetic antibody
TISRHNSNNTLYLQMNSLRAEDTAVYYCAKGRSSSWYDYWGQG

SEQ ID NO: 4135 - protein, 13 aa, Artificial Sequence
  Description of Artificial Sequence: Synthetic antibody
CGHSSSWYCLDYW

SEQ ID NO: 4136 - DNA, 129 bp, Artificial Sequence
  Description of Artificial Sequence: Synthetic antibody
accatctccatatataattccaagaacacgctgtatctgcaaatgaacagcctgagagccgaggacacggccgtatattactgtggtcatagcagcagctggtactgccttgactactggggccaggga

SEQ ID NO: 4137 - protein, 43 aa, Artificial Sequence
  Description of Artificial Sequence: Synthetic antibody
TISIYNSKNTLYLQMNSLRAEDTAVYYCGHSSSWYCLDYWGQG

SEQ ID NO: 4138 - DNA, 129 bp, Artificial Sequence
  Description of Artificial Sequence: Synthetic antibody
accatctccagagataattccaagaacacgctgtatctgcaaatgaacagcctgagagccgaggacacggccgtatattactgtggtcatagcagcagctggtactgccttgactactggggccaggga

SEQ ID NO: 4139 - protein, 43 aa, Artificial Sequence
  Description of Artificial Sequence: Synthetic antibody
TISRDNSKNTLYLQMNSLRAEDTAVYYCGHSSSWYCLDYWGQG

SEQ ID NO: 4140 - DNA, 129 bp, Artificial Sequence
  Description of Artificial Sequence: Synthetic antibody
accatctccagacataattccaagaacacgctgtatctgcaaatgaacagcctgagagccgaggacacggccgtatattactgtggtcatagcagcagctggtactgccttgactactggggccaggga

SEQ ID NO: 4141 - protein, 43 aa, Artificial Sequence
  Description of Artificial Sequence: Synthetic antibody
TISRHNSKNTLYLQMNSLRAEDTAVYYCGHSSSWYCLDYWGQG

SEQ ID NO: 4142 - protein, 17 aa, Artificial Sequence
  Description of Artificial Sequence: Synthetic antibody
CAKDLSVNDYGEPFDSW

SEQ ID NO: 4143 - DNA, 129 bp, Artificial Sequence
  Description of Artificial Sequence: Synthetic antibody
ggcaacgccaagaactccctctttctgcaaatgaacagtctgagagctgaggacacggccttatattactgtgcaaaagacttgagtgtgaatgactatggtgaaccttttgactcctggggccaggga

SEQ ID NO: 4144 - protein, 43 aa, Artificial Sequence
  Description of Artificial Sequence: Synthetic antibody
GNAKNSLFLQMNSLRAEDTALYYCAKDLSVNDYGEPFDSWGQG

SEQ ID NO: 4145 - DNA, 129 bp, Artificial Sequence
  Description of Artificial Sequence: Synthetic antibody
gacaacgccaagaactccctctttctgcaaatgaacagtctgagagctgaggacacggccttatattactgtgcaaaagacttgagtgtgaatgactatggtgagccttttgactcctggggccaggga

SEQ ID NO: 4146 - protein, 43 aa, Artificial Sequence
  Description of Artificial Sequence: Synthetic antibody
DNAKNSLFLQMNSLRAEDTALYYCAKDLSVNDYGEPFDSWGQG

SEQ ID NO: 4147 - DNA, 129 bp, Artificial Sequence
  Description of Artificial Sequence: Synthetic antibody
gacaacgccaagaactccctctttctgcaaatgaacagtctgagagctgaggacacggccttatattactgtgcaaaagacttgagtgtgaatgactatggtgaaccttttgactcctggggccaggga

SEQ ID NO: 4148 - protein, 17 aa, Artificial Sequence
  Description of Artificial Sequence: Synthetic antibody
CAKDMGSPIAAAGNDYW

SEQ ID NO: 4149 - DNA, 129 bp, Artificial Sequence
  Description of Artificial Sequence: Synthetic antibody
tataattccaagaacacgctttatctgcaaatgaacagcctgagagccgaggacacggccgtatattactgtgcgaaagatatgggcagccccatagcagcagctgggaatgactactggggccaggga

SEQ ID NO: 4150 - protein, 43 aa, Artificial Sequence
  Description of Artificial Sequence: Synthetic antibody
YNSKNTLYLQMNSLRAEDTAVYYCAKDMGSPIAAAGNDYWGQG

SEQ ID NO: 4151 - DNA, 129 bp, Artificial Sequence
  Description of Artificial Sequence: Synthetic antibody
tataattccaacaacacgctgtatctgcaaatgaacagcctgagagccgaggacacggccgtatattactgtgcgaaagatatgggcagccccatagcagcagctgggaatgactactggggccaggga

SEQ ID NO: 4152 - protein, 43 aa, Artificial Sequence
  Description of Artificial Sequence: Synthetic antibody
YNSNNTLYLQMNSLRAEDTAVYYCAKDMGSPIAAAGNDYWGQG

SEQ ID NO: 4153 - DNA, 129 bp, Artificial Sequence
  Description of Artificial Sequence: Synthetic antibody
gataattccaagaacacgctgtatctgcaaatgaacagcctgagagccgaggacacggccgtatattactgtgcgaaagatatgggcagccccatagcagcagctgggaatgactactggggccaggga

SEQ ID NO: 4154 - protein, 43 aa, Artificial Sequence
  Description of Artificial Sequence: Synthetic antibody
DNSKNTLYLQMNSLRAEDTAVYYCAKDMGSPIAAAGNDYWGQG

SEQ ID NO: 4155 - protein, 15 aa, Artificial Sequence
  Description of Artificial Sequence: Synthetic antibody
CAKGSGSYYTLYDYW

SEQ ID NO: 4156 - DNA, 129 bp, Artificial Sequence
  Description of Artificial Sequence: Synthetic antibody
tccagagataattccaagaacacgctgtatctgcaaatgaacagcctgagagccgaggacacggccgtatattactgtgcgaaaggttcggggagttattataccctttatgattattggggccaggga

SEQ ID NO: 4157 - protein, 43 aa, Artificial Sequence
  Description of Artificial Sequence: Synthetic antibody
SRDNSKNTLYLQMNSLRAEDTAVYYCAKGSGSYYTLYDYWGQG

SEQ ID NO: 4158 - DNA, 129 bp, Artificial Sequence
  Description of Artificial Sequence: Synthetic antibody
tccagacataattccaacaacacgctgtatctgcaaatgaacagcctgagagccgaggacacggccgtatattactgtgcgaaaggttcggggagttattataccctttatgattattggggccaggga

SEQ ID NO: 4159 - protein, 43 aa, Artificial Sequence
  Description of Artificial Sequence: Synthetic antibody
SRHNSNNTLYLQMNSLRAEDTAVYYCAKGSGSYYTLYDYWGQG

SEQ ID NO: 4160 - DNA, 129 bp, Artificial Sequence
  Description of Artificial Sequence: Synthetic antibody
tccacagataattccaacaacacgctgtatctgcaaatgaacagcctgagagccgaggacacggccgtatattactgtgcgaaaggttcggggagttattataccctttatgattattggggccaggga

SEQ ID NO: 4161 - protein, 43 aa, Artificial Sequence
  Description of Artificial Sequence: Synthetic antibody
STDNSNNTLYLQMNSLRAEDTAVYYCAKGSGSYYTLYDYWGQG

SEQ ID NO: 4162 - protein, 13 aa, Artificial Sequence
  Description of Artificial Sequence: Synthetic antibody
CARGLSSSWYKDW

SEQ ID NO: 4163 - DNA, 129 bp, Artificial Sequence
  Description of Artificial Sequence: Synthetic antibody
accatgaccaggaacacctccataagcacagcgtacatggagctgagcagtctgagatctgaggacacggccgtgtattactgtgcgagaggcctgagcagcagctggtataaggactggggccaggga

SEQ ID NO: 4164 - protein, 43 aa, Artificial Sequence
  Description of Artificial Sequence: Synthetic antibody
TMTRNTSISTAYMELSSLRSEDTAVYYCARGLSSSWYKDWGQG

SEQ ID NO: 4165 - DNA, 129 bp, Artificial Sequence
  Description of Artificial Sequence: Synthetic antibody
accatgaccagcaacacctccataagcacagcgtacatggagctgagcagtctgagatctgaggacacggccgtgtattactgtgcgagaggcctgagcagcagctggtataaggactggggccaggga

SEQ ID NO: 4166 - protein, 43 aa, Artificial Sequence
  Description of Artificial Sequence: Synthetic antibody
TMTSNTSISTAYMELSSLRSEDTAVYYCARGLSSSWYKDWGQG

SEQ ID NO: 4167 - DNA, 129 bp, Artificial Sequence
  Description of Artificial Sequence: Synthetic antibody
accatgaccagcaacacctccataagcacagcgtacatggagctgagcagtctgagagctgaggacacggccgtgtattactgtgcgagaggcctgagcagcagctggtataaggactggggccaggga

SEQ ID NO: 4168 - protein, 43 aa, Artificial Sequence
  Description of Artificial Sequence: Synthetic antibody
TMTSNTSISTAYMELSSLRAEDTAVYYCARGLSSSWYKDWGQG

SEQ ID NO: 4169 - protein, 13 aa, Artificial Sequence
  Description of Artificial Sequence: Synthetic antibody
CWGRIAVAGVDPW

SEQ ID NO: 4170 - DNA, 129 bp, Artificial Sequence
  Description of Artificial Sequence: Synthetic antibody
accatctccatagatcattcaaagaacacggcgtatctgcaaatgaacagcctgaaaaccgaggacacggccgtgtattactgttggggacgtatagcagtggctggagtcgacccctggggccaggga

SEQ ID NO: 4171 - protein, 43 aa, Artificial Sequence
  Description of Artificial Sequence: Synthetic antibody
TISIDHSKNTAYLQMNSLKTEDTAVYYCWGRIAVAGVDPWGQG

SEQ ID NO: 4172 - DNA, 129 bp, Artificial Sequence
  Description of Artificial Sequence: Synthetic antibody
accatctccagagattattcaaagaacacggcgtatctgcaaatgaacagccttaaaaccgaggacacggccgtgtattactgttggggacgtatagcagtggctggagtcgacccctggggccaggga

SEQ ID NO: 4173 - protein, 43 aa, Artificial Sequence
  Description of Artificial Sequence: Synthetic antibody
TISRDYSKNTAYLQMNSLKTEDTAVYYCWGRIAVAGVDPWGQG

SEQ ID NO: 4174 - DNA, 129 bp, Artificial Sequence
  Description of Artificial Sequence: Synthetic antibody
accatctccagagatgattcaaagaacacggcgtatctgcaaatgaacagcctgaaaaccgaggacacggccgtgtattactgttggggacgtatagcagtggctggagtcgacccctggggccaggga

SEQ ID NO: 4175 - protein, 43 aa, Artificial Sequence
  Description of Artificial Sequence: Synthetic antibody
TISRDDSKNTAYLQMNSLKTEDTAVYYCWGRIAVAGVDPWGQG

SEQ ID NO: 4176 - protein, 22 aa, Artificial Sequence
  Description of Artificial Sequence: Synthetic antibody
CAKDFISSSWYTYYYYYGMDVW

SEQ ID NO: 4177 - DNA, 129 bp, Artificial Sequence
  Description of Artificial Sequence: Synthetic antibody
tcgatgtatctgcaaatgaacagcctgagagccgaggacacggccgtatattactgtgcgaaagattttataagcagcagctggtacacctactactactactacggtatggacgtctggggccaaggg

SEQ ID NO: 4178 - protein, 43 aa, Artificial Sequence
  Description of Artificial Sequence: Synthetic antibody
SMYLQMNSLRAEDTAVYYCAKDFISSSWYTYYYYYGMDVWGQG

SEQ ID NO: 4179 - DNA, 129 bp, Artificial Sequence
  Description of Artificial Sequence: Synthetic antibody
acgctgtatctgcaaatgaacagcctgagagccgaggacacggccgtatattactgtgcgaaagattttataagcagcagctggtacacctactactactactacggtatggacgtctggggccaaggg

SEQ ID NO: 4180 - protein, 43 aa, Artificial Sequence
  Description of Artificial Sequence: Synthetic antibody
TLYLQMNSLRAEDTAVYYCAKDFISSSWYTYYYYYGMDVWGQG

SEQ ID NO: 4181 - DNA, 129 bp, Artificial Sequence
  Description of Artificial Sequence: Synthetic antibody
acgatgtatctgcaaatcaacagcctgagagccgaggacacggccgtatattactgtgcgaaagattttataagcagcagctggtacacctactactactactacggtatggacgtctggggccaaggg

SEQ ID NO: 4182 - protein, 43 aa, Artificial Sequence
  Description of Artificial Sequence: Synthetic antibody
TMYLQINSLRAEDTAVYYCAKDFISSSWYTYYYYYGMDVWGQG

SEQ ID NO: 4183 - protein, 13 aa, Artificial Sequence
  Description of Artificial Sequence: Synthetic antibody
CAKGAAAGPFDYW

SEQ ID NO: 4184 - DNA, 129 bp, Artificial Sequence
  Description of Artificial Sequence: Synthetic antibody
tacatctccagagacaacgccaagaactccctgtatctgcaaatgaacagtctgagagctgaggacacggccttgtattactgtgcaaaaggggcagcagctggcccttttgactactggggccaggga

SEQ ID NO: 4185 - protein, 43 aa, Artificial Sequence
  Description of Artificial Sequence: Synthetic antibody
YISRDNAKNSLYLQMNSLRAEDTALYYCAKGAAAGPFDYWGQG

SEQ ID NO: 4186 - DNA, 129 bp, Artificial Sequence
  Description of Artificial Sequence: Synthetic antibody
accatctccagagacaacgccaagaactccctgtatctgcaaatgaacagtctgagagctgaggacacggccttgtattactgtgcaaaaggggcagcagctggcccttttgactactggggccaggga

SEQ ID NO: 4187 - protein, 43 aa, Artificial Sequence
  Description of Artificial Sequence: Synthetic antibody
TISRDNAKNSLYLQMNSLRAEDTALYYCAKGAAAGPFDYWGQG

SEQ ID NO: 4188 - DNA, 129 bp, Artificial Sequence
  Description of Artificial Sequence: Synthetic antibody
accatccccagagacaacgccaagaactccctgtatctgcaaatgaacagtctgagagctgaggacacggccttgtattactgtgcaaaaggggcagcagctggcccttttgactactggggccaggga

SEQ ID NO: 4189 - protein, 43 aa, Artificial Sequence
  Description of Artificial Sequence: Synthetic antibody
TIPRDNAKNSLYLQMNSLRAEDTALYYCAKGAAAGPFDYWGQG

SEQ ID NO: 4190 - protein, 13 aa, Artificial Sequence
  Description of Artificial Sequence: Synthetic antibody
CAKLDHPLSMDVW

SEQ ID NO: 4191 - DNA, 129 bp, Artificial Sequence
  Description of Artificial Sequence: Synthetic antibody
accatctccatatataattccaagaacacgctgtatctgcaaatgaacagcctgagagccgaggacacggccgtatattactgtgcgaaattagatcaccctttaagtatggacgtctggggccaaggg

SEQ ID NO: 4192 - protein, 43 aa, Artificial Sequence
  Description of Artificial Sequence: Synthetic antibody
TISIYNSKNTLYLQMNSLRAEDTAVYYCAKLDHPLSMDVWGQG

SEQ ID NO: 4193 - DNA, 129 bp, Artificial Sequence
  Description of Artificial Sequence: Synthetic antibody
accatctccatacataattccaagaacacgctgtatctgcaaatgaacagcctgagagccgaggacacggccgtatattactgtgcgaaattagatcaccctttaagtatggacgtctggggccaaggg

SEQ ID NO: 4194 - protein, 43 aa, Artificial Sequence
  Description of Artificial Sequence: Synthetic antibody
TISIHNSKNTLYLQMNSLRAEDTAVYYCAKLDHPLSMDVWGQG

SEQ ID NO: 4195 - DNA, 129 bp, Artificial Sequence
  Description of Artificial Sequence: Synthetic antibody
accatctccagagataattccaagaacacgctgtatctgcaaatgaacagcctgagagccgaggacacggccgtatattactgtgcgaaattagatcaccctttaagtatggacgtctggggccaaggg

SEQ ID NO: 4196 - protein, 43 aa, Artificial Sequence
  Description of Artificial Sequence: Synthetic antibody
TISRDNSKNTLYLQMNSLRAEDTAVYYCAKLDHPLSMDVWGQG

SEQ ID NO: 4197 - protein, 14 aa, Artificial Sequence
  Description of Artificial Sequence: Synthetic antibody
CVKADTGGYYYAYW

SEQ ID NO: 4198 - DNA, 129 bp, Artificial Sequence
  Description of Artificial Sequence: Synthetic antibody
atctccatacacaattccaagaacacactgtatctgcaaatgaacagcctgagagccgaggacacggccgtatattactgtgtgaaagccgatactggtggttattactatgcctactggggccaggga

SEQ ID NO: 4199 - protein, 43 aa, Artificial Sequence
  Description of Artificial Sequence: Synthetic antibody
ISIHNSKNTLYLQMNSLRAEDTAVYYCVKADTGGYYYAYWGQG

SEQ ID NO: 4200 - DNA, 129 bp, Artificial Sequence
  Description of Artificial Sequence: Synthetic antibody
atctccagagacaattccaagaacacactgtatctgcaaatgaacagcctgagagccgaggacacggccgtatattactgtgtgaaagccgatactggtggttattactatgcctactggggccaggga

SEQ ID NO: 4201 - protein, 43 aa, Artificial Sequence
  Description of Artificial Sequence: Synthetic antibody
ISRDNSKNTLYLQMNSLRAEDTAVYYCVKADTGGYYYAYWGQG

SEQ ID NO: 4202 - DNA, 129 bp, Artificial Sequence
  Description of Artificial Sequence: Synthetic antibody
atctccagacacaattccaacaacacactgtatctgcaaatgaacagcctgagagccgaggacacggccgtatattactgtgtgaaagccgatactggtggttattactatgcctactggggccaggga

SEQ ID NO: 4203 - protein, 43 aa, Artificial Sequence
  Description of Artificial Sequence: Synthetic antibody
ISRHNSNNTLYLQMNSLRAEDTAVYYCVKADTGGYYYAYWGQG

SEQ ID NO: 4204 - protein, 16 aa, Artificial Sequence
  Description of Artificial Sequence: Synthetic antibody
CARGRGHWGNWYFDLW

SEQ ID NO: 4205 - DNA, 129 bp, Artificial Sequence
  Description of Artificial Sequence: Synthetic antibody
gtagacacgtccaacaaccagttctccctgaagctgagctctgtgaccgccgcggacacgactgtattttactgtgcgagaggtcggggccactgggggaactggtacttcgatctctggggccgtggc

SEQ ID NO: 4206 - protein, 43 aa, Artificial Sequence
  Description of Artificial Sequence: Synthetic antibody
VDTSNNQFSLKLSSVTAADTTVFYCARGRGHWGNWYFDLWGRG

SEQ ID NO: 4207 - DNA, 129 bp, Artificial Sequence
  Description of Artificial Sequence: Synthetic antibody
gtagacacgtccaagaaccagttctccctgaagctgagctctgtgaccgccgcggacacgactgtattttactgtgcgagaggtcggggccactgggggaactggtacttcgatctctggggccgtggc

SEQ ID NO: 4208 - protein, 43 aa, Artificial Sequence
  Description of Artificial Sequence: Synthetic antibody
VDTSKNQFSLKLSSVTAADTTVFYCARGRGHWGNWYFDLWGRG

SEQ ID NO: 4209 - DNA, 129 bp, Artificial Sequence
  Description of Artificial Sequence: Synthetic antibody
gtagacacgcccaagaaccagttctccctgaagctgagctctgtgaccgccgcggacacgactgtattttactgtgcgagaggtcggggccactgggggaactggtacttcgatctctggggccgtggc

SEQ ID NO: 4210 - protein, 43 aa, Artificial Sequence
  Description of Artificial Sequence: Synthetic antibody
VDTPKNQFSLKLSSVTAADTTVFYCARGRGHWGNWYFDLWGRG

SEQ ID NO: 4211 - protein, 17 aa, Artificial Sequence
  Description of Artificial Sequence: Synthetic antibody
CARVTLFVADLYYFHYW

SEQ ID NO: 4212 - DNA, 129 bp, Artificial Sequence
  Description of Artificial Sequence: Synthetic antibody
gacaaattcacgaccacagcctacatggagctgagcagcctgagatctgaggacacggccgtgtattactgtgcgagagtgactttgttcgtcgctgacctgtactactttcactactggggccaggga

SEQ ID NO: 4213 - protein, 43 aa, Artificial Sequence
  Description of Artificial Sequence: Synthetic antibody
DKFTTTAYMELSSLRSEDTAVYYCARVTLFVADLYYFHYWGQG

SEQ ID NO: 4214 - DNA, 129 bp, Artificial Sequence
  Description of Artificial Sequence: Synthetic antibody
gacaaatacacgaccacagcctacatggagctgagcagcctgagatctgaggacacggccgtgtattactgtgcgagagtgactttgttcgtcgctgacctgtactactttcactactggggccaggga

SEQ ID NO: 4215 - protein, 43 aa, Artificial Sequence
  Description of Artificial Sequence: Synthetic antibody
DKYTTTAYMELSSLRSEDTAVYYCARVTLFVADLYYFHYWGQG

SEQ ID NO: 4216 - DNA, 129 bp, Artificial Sequence
  Description of Artificial Sequence: Synthetic antibody
gaaaaattcacgaccacagcctacatggagctgagcagcctgagatctgaggacacggccgtgtattactgtgcgagagtgactttgttcgtcgctgacctgtactactttcactactggggccaggga

SEQ ID NO: 4217 - protein, 43 aa, Artificial Sequence
  Description of Artificial Sequence: Synthetic antibody
EKFTTTAYMELSSLRSEDTAVYYCARVTLFVADLYYFHYWGQG

SEQ ID NO: 4218 - protein, 16 aa, Artificial Sequence
  Description of Artificial Sequence: Synthetic antibody
CARGRGDGDGGGMDVW

SEQ ID NO: 4219 - DNA, 129 bp, Artificial Sequence
  Description of Artificial Sequence: Synthetic antibody
gtagacacgtctaagaacctgttctccctgaagctgagctctgtgactgccgcggacacggccgtgtattactgtgcgagaggaagaggcgacggtgacggcggcggtatggacgtctggggccaaggg

SEQ ID NO: 4220 - protein, 43 aa, Artificial Sequence
  Description of Artificial Sequence: Synthetic antibody
VDTSKNLFSLKLSSVTAADTAVYYCARGRGDGDGGGMDVWGQG

SEQ ID NO: 4221 - DNA, 129 bp, Artificial Sequence
  Description of Artificial Sequence: Synthetic antibody
gtagacacgtctaacaaccagttctccctgaagctgagctctgtgactgccgcggacacggccgtgtattactgtgcgagaggaagaggcgacggtgacggcggcggtatggacgtctggggccaaggg

SEQ ID NO: 4222 - protein, 43 aa, Artificial Sequence
  Description of Artificial Sequence: Synthetic antibody
VDTSNNQFSLKLSSVTAADTAVYYCARGRGDGDGGGMDVWGQG

SEQ ID NO: 4223 - DNA, 129 bp, Artificial Sequence
  Description of Artificial Sequence: Synthetic antibody
gtagacacgtctaagaaccagttctccctgaagctgagctctgtgactgccgcggacacggccgtgtattactgtgcgagaggaagaggcgacggtgacggcggcggtatggacgtctggggccaaggg

SEQ ID NO: 4224 - protein, 43 aa, Artificial Sequence
  Description of Artificial Sequence: Synthetic antibody
VDTSKNQFSLKLSSVTAADTAVYYCARGRGDGDGGGMDVWGQG

SEQ ID NO: 4225 - protein, 13 aa, Artificial Sequence
  Description of Artificial Sequence: Synthetic antibody
CARSPSPDYFDHW

SEQ ID NO: 4226 - DNA, 129 bp, Artificial Sequence
  Description of Artificial Sequence: Synthetic antibody
tccatatcaataaacacgtccaggaatcacttctccctgaagctgagctctgtgaccgctgcggacacggccgtgtactactgtgcgagatcccccagtccagactactttgaccactggggccaggga

SEQ ID NO: 4227 - protein, 43 aa, Artificial Sequence
  Description of Artificial Sequence: Synthetic antibody
SISINTSRNHFSLKLSSVTAADTAVYYCARSPSPDYFDHWGQG

SEQ ID NO: 4228 - DNA, 129 bp, Artificial Sequence
  Description of Artificial Sequence: Synthetic antibody
tcaatatcaataaccacgtccaggaatcacttctccctgaagctgagctctgtgaccgctgcggacacggccgtgtactactgtgcgagatcccccagtccagactactttgaccactggggccaggga

SEQ ID NO: 4229 - protein, 43 aa, Artificial Sequence
  Description of Artificial Sequence: Synthetic antibody
SISITTSRNHFSLKLSSVTAADTAVYYCARSPSPDYFDHWGQG

SEQ ID NO: 4230 - DNA, 129 bp, Artificial Sequence
  Description of Artificial Sequence: Synthetic antibody
tcaatatcaaaaaacacgtccaggaatcacttctccctgaagctgagctctgtgaccgctgcggacacggccgtgtactactgtgcgagatcccccagtccagactactttgaccactggggccaggga

SEQ ID NO: 4231 - protein, 43 aa, Artificial Sequence
  Description of Artificial Sequence: Synthetic antibody
SISKNTSRNHFSLKLSSVTAADTAVYYCARSPSPDYFDHWGQG

SEQ ID NO: 4232 - protein, 11 aa, Artificial Sequence
  Description of Artificial Sequence: Synthetic antibody
CVRDNWGLDCW

SEQ ID NO: 4233 - DNA, 129 bp, Artificial Sequence
  Description of Artificial Sequence: Synthetic antibody
agattcaccatctcaagatatgattcaaagaactcactgtatctacaaatgaacagcctgaaaaccgaagacacggccgtgtattactgtgttagagacaactgggggcttgactgctggggccaggga

SEQ ID NO: 4234 - protein, 43 aa, Artificial Sequence
  Description of Artificial Sequence: Synthetic antibody
RFTISRYDSKNSLYLQMNSLKTEDTAVYYCVRDNWGLDCWGQG

SEQ ID NO: 4235 - DNA, 129 bp, Artificial Sequence
  Description of Artificial Sequence: Synthetic antibody
agattcaccatctcaagagatgattcaaagaactcactgtatctacaaatgaacagccttaaaaccgaagacacggccgtgtattactgtgttagagacaactgggggcttgactgctggggccaggga

SEQ ID NO: 4236 - protein, 43 aa, Artificial Sequence
  Description of Artificial Sequence: Synthetic antibody
RFTISRDDSKNSLYLQMNSLKTEDTAVYYCVRDNWGLDCWGQG

SEQ ID NO: 4237 - DNA, 129 bp, Artificial Sequence
  Description of Artificial Sequence: Synthetic antibody
agattcaccatctcaagagatgattcaaagaactcactgtatctacaaatgaacagcctgaaaaccgaagacacggccgtgtattactgtgttagagacaactgggggcttgactgctggggccaggga

SEQ ID NO: 4238 - protein, 16 aa, Artificial Sequence
  Description of Artificial Sequence: Synthetic antibody
CARPGSSGWQGYFDYW

SEQ ID NO: 4239 - DNA, 129 bp, Artificial Sequence
  Description of Artificial Sequence: Synthetic antibody
tgggacacgtccacgagcactgtctacatggagctgagcagcctgagatctgaggacacggccgtgtattactgtgcgagaccgggaagtagtggctggcagggctactttgactactggggccaggga

SEQ ID NO: 4240 - protein, 43 aa, Artificial Sequence
  Description of Artificial Sequence: Synthetic antibody
WDTSTSTVYMELSSLRSEDTAVYYCARPGSSGWQGYFDYWGQG

SEQ ID NO: 4241 - DNA, 129 bp, Artificial Sequence
  Description of Artificial Sequence: Synthetic antibody
tgggacacgcccacgagcacagtctacatggagctgagcagcctgagatctgaggacacggccgtgtattactgtgcgagaccgggaagtagtggctggcagggctactttgactactggggccaggga

SEQ ID NO: 4242 - protein, 43 aa, Artificial Sequence
  Description of Artificial Sequence: Synthetic antibody
WDTPTSTVYMELSSLRSEDTAVYYCARPGSSGWQGYFDYWGQG

SEQ ID NO: 4243 - DNA, 129 bp, Artificial Sequence
  Description of Artificial Sequence: Synthetic antibody
agggacacgtccacgagcacagtctacatggagctgagcagcctgagatctgaggacacggccgtgtattactgtgcgagaccgggaagtagtggctggcagggctactttgactactggggccaggga

SEQ ID NO: 4244 - protein, 43 aa, Artificial Sequence
  Description of Artificial Sequence: Synthetic antibody
RDTSTSTVYMELSSLRSEDTAVYYCARPGSSGWQGYFDYWGQG

SEQ ID NO: 4245 - protein, 16 aa, Artificial Sequence
  Description of Artificial Sequence: Synthetic antibody
CAKDPSSSWSFGIDYW

SEQ ID NO: 4246 - DNA, 129 bp, Artificial Sequence
  Description of Artificial Sequence: Synthetic antibody
agagacaattccaagaacacgctgtatctgcaaatgagcagcctgagagccgaggacacggccgtatattactgtgcgaaagatccgagcagcagctggtccttcgggattgactactggggccaggga

SEQ ID NO: 4247 - protein, 43 aa, Artificial Sequence
  Description of Artificial Sequence: Synthetic antibody
RDNSKNTLYLQMSSLRAEDTAVYYCAKDPSSSWSFGIDYWGQG

SEQ ID NO: 4248 - DNA, 129 bp, Artificial Sequence
  Description of Artificial Sequence: Synthetic antibody
agagacaattccaagaacacgctgtatctgcaaatgaacagcctgagagccgaggacacggccgtatattactgtgcgaaagatccgagcagcagctggtctttcgggattgactactggggccaggga

SEQ ID NO: 4249 - protein, 43 aa, Artificial Sequence
  Description of Artificial Sequence: Synthetic antibody
RDNSKNTLYLQMNSLRAEDTAVYYCAKDPSSSWSFGIDYWGQG

SEQ ID NO: 4250 - DNA, 129 bp, Artificial Sequence
  Description of Artificial Sequence: Synthetic antibody
agagacaattccaacaacacgctgtatctgcaaatgaaccgcctgagagccgaggacacggccgtatattactgtgcgaaagatccgagcagcagctggtctttcgggattgactactggggccaggga

SEQ ID NO: 4251 - protein, 43 aa, Artificial Sequence
  Description of Artificial Sequence: Synthetic antibody
RDNSNNTLYLQMNRLRAEDTAVYYCAKDPSSSWSFGIDYWGQG

SEQ ID NO: 4252 - protein, 16 aa, Artificial Sequence
  Description of Artificial Sequence: Synthetic antibody
CAKGGHGSGNDYFDSW

SEQ ID NO: 4253 - DNA, 129 bp, Artificial Sequence
  Description of Artificial Sequence: Synthetic antibody
agatataattccaagaacacgctgtatctgcaaatgaaccgcctgagagccgaggacacggccgtatattactgtgcgaaagggggccatggttcggggaacgactactttgactcctggggccaggga

SEQ ID NO: 4254 - protein, 43 aa, Artificial Sequence
  Description of Artificial Sequence: Synthetic antibody
RYNSKNTLYLQMNRLRAEDTAVYYCAKGGHGSGNDYFDSWGQG

SEQ ID NO: 4255 - DNA, 129 bp, Artificial Sequence
  Description of Artificial Sequence: Synthetic antibody
agatataattccaagaacacgctgtatctgcaaatgaacagcctgagagccgaggacacggccgtatattactgtgcgaaagggggccatggttcggggaacgactactttgactcctggggccaggga

SEQ ID NO: 4256 - protein, 43 aa, Artificial Sequence
  Description of Artificial Sequence: Synthetic antibody
RYNSKNTLYLQMNSLRAEDTAVYYCAKGGHGSGNDYFDSWGQG

SEQ ID NO: 4257 - DNA, 129 bp, Artificial Sequence
  Description of Artificial Sequence: Synthetic antibody
agagataattccaagaacacgctgtatctgcaaatgaacagcctgagagccgaggacacggccgtatattactgtgcgaaagggggccatggttcggggaacgactactttgactcctggggccaggga

SEQ ID NO: 4258 - protein, 43 aa, Artificial Sequence
  Description of Artificial Sequence: Synthetic antibody
RDNSKNTLYLQMNSLRAEDTAVYYCAKGGHGSGNDYFDSWGQG

SEQ ID NO: 4259 - protein, 15 aa, Artificial Sequence
  Description of Artificial Sequence: Synthetic antibody
CARTRMSGFVLFDYW

SEQ ID NO: 4260 - DNA, 129 bp, Artificial Sequence
  Description of Artificial Sequence: Synthetic antibody
ctccaaggacacctccaaaaccaggtggtccttacaatgaccaacatggaccctgtggacacagccacgtattactgtgcacggacccggatgtccgggttcgtcctctttgactactggggccaggga

SEQ ID NO: 4261 - protein, 43 aa, Artificial Sequence
  Description of Artificial Sequence: Synthetic antibody
LQGHLQNQVVLTMTNMDPVDTATYYCARTRMSGFVLFDYWGQG

SEQ ID NO: 4262 - DNA, 129 bp, Artificial Sequence
  Description of Artificial Sequence: Synthetic antibody
tccaaggacacctccaaaaaccaggtggtccttacaatgaccaacatggaccctgtggacacagccacgtattactgtgcacggacccggatgtccgggttcgtcctctttgactactggggccaggga

SEQ ID NO: 4263 - protein, 43 aa, Artificial Sequence
  Description of Artificial Sequence: Synthetic antibody
SKDTSKNQVVLTMTNMDPVDTATYYCARTRMSGFVLFDYWGQG

SEQ ID NO: 4264 - DNA, 129 bp, Artificial Sequence
  Description of Artificial Sequence: Synthetic antibody
tacaaggacacctccaaaatccaggtggtccttacaatgaccaacatggaccctgtggacacagccacgtattactgtgcacggacccggatgtccgggttcgtcctctttgactactggggccaggga

SEQ ID NO: 4265 - protein, 43 aa, Artificial Sequence
  Description of Artificial Sequence: Synthetic antibody
YKDTSKIQVVLTMTNMDPVDTATYYCARTRMSGFVLFDYWGQG

SEQ ID NO: 4266 - protein, 20 aa, Artificial Sequence
  Description of Artificial Sequence: Synthetic antibody
CARAKRATYGGNGRYAFDIW

SEQ ID NO: 4267 - DNA, 129 bp, Artificial Sequence
  Description of Artificial Sequence: Synthetic antibody
gcgagcaccgcctacatggcgctgagcagcctgagatctgaagacacggctgtgtattactgtgcgagagccaaacgcgccacttacggtggtaacggccgctatgcttttgatatctggggccaaggg

SEQ ID NO: 4268 - protein, 43 aa, Artificial Sequence
  Description of Artificial Sequence: Synthetic antibody
ASTAYMALSSLRSEDTAVYYCARAKRATYGGNGRYAFDIWGQG

SEQ ID NO: 4269 - DNA, 129 bp, Artificial Sequence
  Description of Artificial Sequence: Synthetic antibody
gcgagcacagcctacatggagctgagcagcctgagatctgaagacacggctgtgtattactgtgcgagagccaaacgcgccacttacggtggtaacggccgctatgcttttgatatctggggccaaggg

SEQ ID NO: 4270 - protein, 43 aa, Artificial Sequence
  Description of Artificial Sequence: Synthetic antibody
ASTAYMELSSLRSEDTAVYYCARAKRATYGGNGRYAFDIWGQG

SEQ ID NO: 4271 - DNA, 129 bp, Artificial Sequence
  Description of Artificial Sequence: Synthetic antibody
gcctgcacagcctacatggagctgagcagcctgagatctgaagacacggctgtgtattactgtgcgagagccaaacgcgccacttacggtggtaacggccgctatgcttttgatatctggggccaaggg

SEQ ID NO: 4272 - protein, 43 aa, Artificial Sequence
  Description of Artificial Sequence: Synthetic antibody
ACTAYMELSSLRSEDTAVYYCARAKRATYGGNGRYAFDIWGQG

SEQ ID NO: 4273 - protein, 13 aa, Artificial Sequence
  Description of Artificial Sequence: Synthetic antibody
CAKDRYSGTYDYW

SEQ ID NO: 4274 - DNA, 129 bp, Artificial Sequence
  Description of Artificial Sequence: Synthetic antibody
accatctccatacacaattccaagaacacgctgtatctgcaaatgaacagcctgagagccgaggacacggccgtatattactgtgcgaaggaccggtatagtgggacctatgactactggggccaggga

SEQ ID NO: 4275 - protein, 43 aa, Artificial Sequence
  Description of Artificial Sequence: Synthetic antibody
TISIHNSKNTLYLQMNSLRAEDTAVYYCAKDRYSGTYDYWGQG

SEQ ID NO: 4276 - DNA, 129 bp, Artificial Sequence
  Description of Artificial Sequence: Synthetic antibody
accatctccagagacaattccaagaacacgctgtatctgcaaatgaacagcctgagagccgaggacacggccgtatattactgtgcgaaggaccggtatagtgggacctatgactactggggccaggga

SEQ ID NO: 4277 - protein, 43 aa, Artificial Sequence
  Description of Artificial Sequence: Synthetic antibody
TISRDNSKNTLYLQMNSLRAEDTAVYYCAKDRYSGTYDYWGQG

SEQ ID NO: 4278 - DNA, 129 bp, Artificial Sequence
  Description of Artificial Sequence: Synthetic antibody
accatctccagacacaattccaagaacacgctgtatctgcaaatgaacagcctgagagccgaggacacggccgtatattactgtgcgaaggaccggtatagtgggacctatgactactggggccaggga

SEQ ID NO: 4279 - protein, 43 aa, Artificial Sequence
  Description of Artificial Sequence: Synthetic antibody
TISRHNSKNTLYLQMNSLRAEDTAVYYCAKDRYSGTYDYWGQG

SEQ ID NO: 4280 - protein, 22 aa, Artificial Sequence
  Description of Artificial Sequence: Synthetic antibody
CARDPSTDTIFGPHGKGWFDPW

SEQ ID NO: 4281 - DNA, 129 bp, Artificial Sequence
  Description of Artificial Sequence: Synthetic antibody
acagcctacttggagctgagcagcctgagatctgaggacacggccgtgtattactgtgcgagagatccatcgaccgatacgatttttggaccccacgggaagggctggttcgacccctggggccaggga

SEQ ID NO: 4282 - protein, 43 aa, Artificial Sequence
  Description of Artificial Sequence: Synthetic antibody
TAYLELSSLRSEDTAVYYCARDPSTDTIFGPHGKGWFDPWGQG

SEQ ID NO: 4283 - DNA, 129 bp, Artificial Sequence
  Description of Artificial Sequence: Synthetic antibody
acagcctacatggagctgagcagcctgagatctgaggacacggccgtgtattactgtgcgagagatccatcgaccgatacgatttttggaccccacgggaagggctggttcgacccctggggccaggga

SEQ ID NO: 4284 - protein, 43 aa, Artificial Sequence
  Description of Artificial Sequence: Synthetic antibody
TAYMELSSLRSEDTAVYYCARDPSTDTIFGPHGKGWFDPWGQG

SEQ ID NO: 4285 - DNA, 129 bp, Artificial Sequence
  Description of Artificial Sequence: Synthetic antibody
aaagcctacatggcgctgagcagcctgagatctgaggacacggccgtgtattactgtgcgagagatccatcgaccgatacgatttttggaccccacgggaagggctggttcgacccctggggccaggga

SEQ ID NO: 4286 - protein, 43 aa, Artificial Sequence
  Description of Artificial Sequence: Synthetic antibody
KAYMALSSLRSEDTAVYYCARDPSTDTIFGPHGKGWFDPWGQG

SEQ ID NO: 4287 - protein, 12 aa, Artificial Sequence
  Description of Artificial Sequence: Synthetic antibody
CASGEGGPPDYW

SEQ ID NO: 4288 - DNA, 129 bp, Artificial Sequence
  Description of Artificial Sequence: Synthetic antibody
gtcacgattaccgcggacaaatccacgagcacagcctacatggagctgagcagcctgagatctgaggacacggccgtgtattactgtgcgagtggtgaaggggggcctcctgactactggggccaggga

SEQ ID NO: 4289 - protein, 43 aa, Artificial Sequence
  Description of Artificial Sequence: Synthetic antibody
VTITADKSTSTAYMELSSLRSEDTAVYYCASGEGGPPDYWGQG

SEQ ID NO: 4290 - DNA, 129 bp, Artificial Sequence
  Description of Artificial Sequence: Synthetic antibody
gtcacgattaccgcgcacaaatccacgagcacagcctacatggagctgagcagcctgagatctgaggacacggccgtgtattactgtgcgagtggtgaaggggggcctcctgactactggggccaggga

SEQ ID NO: 4291 - protein, 43 aa, Artificial Sequence
  Description of Artificial Sequence: Synthetic antibody
VTITAHKSTSTAYMELSSLRSEDTAVYYCASGEGGPPDYWGQG

SEQ ID NO: 4292 - DNA, 129 bp, Artificial Sequence
  Description of Artificial Sequence: Synthetic antibody
gtcacgattaccgcgcacaaaaccacgagcacagcctacatggagctgagcagcctgagatctgaggacacggccgtgtattactgtgcgagtggtgaaggggggcctcctgactactggggccaggga

SEQ ID NO: 4293 - protein, 43 aa, Artificial Sequence
  Description of Artificial Sequence: Synthetic antibody
VTITAHKTTSTAYMELSSLRSEDTAVYYCASGEGGPPDYWGQG

SEQ ID NO: 4294 - protein, 11 aa, Artificial Sequence
  Description of Artificial Sequence: Synthetic antibody
CARENAPFDYW

SEQ ID NO: 4295 - DNA, 129 bp, Artificial Sequence
  Description of Artificial Sequence: Synthetic antibody
cggttcaccatctccagatataattccaagaacacgctgtatctgcaaatgaacagcctgagagccgaggacacggccgtatattactgtgcgagagaaaatgccccatttgactactggggccaggga

SEQ ID NO: 4296 - protein, 43 aa, Artificial Sequence
  Description of Artificial Sequence: Synthetic antibody
RFTISRYNSKNTLYLQMNSLRAEDTAVYYCARENAPFDYWGQG

SEQ ID NO: 4297 - DNA, 129 bp, Artificial Sequence
  Description of Artificial Sequence: Synthetic antibody
cggttcaccatctccagatataattccaagaacacgctgtatctgcaaatcaacagcctgagagccgaggacacggccgtatattactgtgcgagagaaaatgccccatttgactactggggccaggga

SEQ ID NO: 4298 - protein, 43 aa, Artificial Sequence
  Description of Artificial Sequence: Synthetic antibody
RFTISRYNSKNTLYLQINSLRAEDTAVYYCARENAPFDYWGQG

SEQ ID NO: 4299 - DNA, 129 bp, Artificial Sequence
  Description of Artificial Sequence: Synthetic antibody
cggttcaccatctccagagataattccaagaacacgctgtatctgcaaatgaacagcctgagagccgaggacacggccgtatattactgtgcgagagaaaatgccccatttgactactggggccaggga

SEQ ID NO: 4300 - protein, 43 aa, Artificial Sequence
  Description of Artificial Sequence: Synthetic antibody
RFTISRDNSKNTLYLQMNSLRAEDTAVYYCARENAPFDYWGQG

SEQ ID NO: 4301 - protein, 18 aa, Artificial Sequence
  Description of Artificial Sequence: Synthetic antibody
CARDHGSGSYWGNAFDIW

SEQ ID NO: 4302 - DNA, 129 bp, Artificial Sequence
  Description of Artificial Sequence: Synthetic antibody
acgtccacgtgcacagtctacttggagctgagcagcctgagatctgaggacacggccgtgtattactgtgcgagagaccatggttcggggagttattggggcaatgcttttgatatctggggccaaggg

SEQ ID NO: 4303 - protein, 43 aa, Artificial Sequence
  Description of Artificial Sequence: Synthetic antibody
TSTCTVYLELSSLRSEDTAVYYCARDHGSGSYWGNAFDIWGQG

SEQ ID NO: 4304 - DNA, 129 bp, Artificial Sequence
  Description of Artificial Sequence: Synthetic antibody
acgtccacgtgcacagtctacatggagctgagcagcctgagatctgaggacacggccgtgtattactgtgcgagagaccatggttcggggagttattggggcaatgcttttgatatctggggccaaggg

SEQ ID NO: 4305 - protein, 43 aa, Artificial Sequence
  Description of Artificial Sequence: Synthetic antibody
TSTCTVYMELSSLRSEDTAVYYCARDHGSGSYWGNAFDIWGQG

SEQ ID NO: 4306 - DNA, 129 bp, Artificial Sequence
  Description of Artificial Sequence: Synthetic antibody
acgtccacgagcacagtctacatggagctgagcagcctgagatctgaggacacggccgtgtattactgtgcgagagaccatggttcggggagttattggggcaatgcttttgatatctggggccaaggg

SEQ ID NO: 4307 - protein, 43 aa, Artificial Sequence
  Description of Artificial Sequence: Synthetic antibody
TSTSTVYMELSSLRSEDTAVYYCARDHGSGSYWGNAFDIWGQG

SEQ ID NO: 4308 - protein, 18 aa, Artificial Sequence
  Description of Artificial Sequence: Synthetic antibody
CAHRNTWIQLWGGWFDPW

SEQ ID NO: 4309 - DNA, 129 bp, Artificial Sequence
  Description of Artificial Sequence: Synthetic antibody
tcctccaaaaacctggtggtccttacaatgaccaacatggaccctgtggacacagccacatattactgtgcacacagaaatacgtggatacagctatggggggggtggttcgacccctggggccaggga

SEQ ID NO: 4310 - protein, 43 aa, Artificial Sequence
  Description of Artificial Sequence: Synthetic antibody
SSKNLVVLTMTNMDPVDTATYYCAHRNTWIQLWGGWFDPWGQG

SEQ ID NO: 4311 - DNA, 129 bp, Artificial Sequence
  Description of Artificial Sequence: Synthetic antibody
acctccaaaaaccaggtggtccttacaatgaccaacatggaccctgtggacacagccacatattactgtgcacacagaaatacgtggatacagctatggggggggtggttcgacccctggggccaggga

SEQ ID NO: 4312 - protein, 43 aa, Artificial Sequence
  Description of Artificial Sequence: Synthetic antibody
TSKNQVVLTMTNMDPVDTATYYCAHRNTWIQLWGGWFDPWGQG

SEQ ID NO: 4313 - DNA, 129 bp, Artificial Sequence
  Description of Artificial Sequence: Synthetic antibody
cacctccaaaaccaggtggtccttacaatgaccaacatggaccctgtggacacagccacatattactgtgcacacagaaatacgtggatacagctatggggggggtggttcgacccctggggccaggga

SEQ ID NO: 4314 - protein, 43 aa, Artificial Sequence
  Description of Artificial Sequence: Synthetic antibody
HLQNQVVLTMTNMDPVDTATYYCAHRNTWIQLWGGWFDPWGQG

SEQ ID NO: 4315 - protein, 14 aa, Artificial Sequence
  Description of Artificial Sequence: Synthetic antibody
CAHIRPGIWGMDVW

SEQ ID NO: 4316 - DNA, 129 bp, Artificial Sequence
  Description of Artificial Sequence: Synthetic antibody
catcaccaaggacacctccaaaaccaggtggtccttacaatgaccaacatggaccctgtggacacagccacatattactgtgcacacatacgtccgggtatctggggtatggacgtctggggccaaggg

SEQ ID NO: 4317 - protein, 43 aa, Artificial Sequence
  Description of Artificial Sequence: Synthetic antibody
HHQGHLQNQVVLTMTNMDPVDTATYYCAHIRPGIWGMDVWGQG

SEQ ID NO: 4318 - DNA, 129 bp, Artificial Sequence
  Description of Artificial Sequence: Synthetic antibody
catcaccaaggacacctccaaaaaccaggtggtcctacaatgaccaacatggaccctgtggacacagccacatattactgtgcacacatacgtccgggtatctggggtatggacgtctggggccaaggg

SEQ ID NO: 4319 - protein, 43 aa, Artificial Sequence
  Description of Artificial Sequence: Synthetic antibody
HHQGHLQKPGGPTMTNMDPVDTATYYCAHIRPGIWGMDVWGQG

SEQ ID NO: 4320 - DNA, 129 bp, Artificial Sequence
  Description of Artificial Sequence: Synthetic antibody
atcaccaaggacacctccaaaaaccaggtggtccttacaatgaccaacatggaccctgtggacacagccacatattactgtgcacacatacgtccgggtatctggggtatggacgtctggggccaaggg

SEQ ID NO: 4321 - protein, 43 aa, Artificial Sequence
  Description of Artificial Sequence: Synthetic antibody
ITKDTSKNQVVLTMTNMDPVDTATYYCAHIRPGIWGMDVWGQG

SEQ ID NO: 4322 - protein, 14 aa, Artificial Sequence
  Description of Artificial Sequence: Synthetic antibody
CARGSGSYSFFDYW

SEQ ID NO: 4323 - DNA, 129 bp, Artificial Sequence
  Description of Artificial Sequence: Synthetic antibody
ttttcagtagacacgtctaagaaccagttctccctgaagctgagctctgtgactgccgcggacacggccgtgtattactgtgcgagagggagtgggagctactccttctttgactactggggccaggga

SEQ ID NO: 4324 - protein, 43 aa, Artificial Sequence
  Description of Artificial Sequence: Synthetic antibody
FSVDTSKNQFSLKLSSVTAADTAVYYCARGSGSYSFFDYWGQG

SEQ ID NO: 4325 - DNA, 129 bp, Artificial Sequence
  Description of Artificial Sequence: Synthetic antibody
atatcagtagacacgtctaagaaccagttctccctgaagctgagctctgtgactgccgcggacacggccgtgtattactgtgcgagagggagtgggagctactccttctttgactactggggccaggga

SEQ ID NO: 4326 - protein, 43 aa, Artificial Sequence
  Description of Artificial Sequence: Synthetic antibody
ISVDTSKNQFSLKLSSVTAADTAVYYCARGSGSYSFFDYWGQG

SEQ ID NO: 4327 - DNA, 129 bp, Artificial Sequence
  Description of Artificial Sequence: Synthetic antibody
atatcagcagacacgtctaagaaccagttctccctgaagctgaactctgtgactgccgcggacacggccgtgtattactgtgcgagagggagtgggagctactccttctttgactactggggccaggga

SEQ ID NO: 4328 - protein, 43 aa, Artificial Sequence
  Description of Artificial Sequence: Synthetic antibody
ISADTSKNQFSLKLNSVTAADTAVYYCARGSGSYSFFDYWGQG

SEQ ID NO: 4329 - protein, 16 aa, Artificial Sequence
  Description of Artificial Sequence: Synthetic antibody
CARVKYGFGLYGMDVW

SEQ ID NO: 4330 - DNA, 129 bp, Artificial Sequence
  Description of Artificial Sequence: Synthetic antibody
tgggacaacgccaagaactcactgtatctgcaaatgaacagcctgagagccgaggacacggccgtgtattactgtgcgagagtcaagtacggttttggcctctacggtatggacgtctggggccaaggg

SEQ ID NO: 4331 - protein, 43 aa, Artificial Sequence
  Description of Artificial Sequence: Synthetic antibody
WDNAKNSLYLQMNSLRAEDTAVYYCARVKYGFGLYGMDVWGQG

SEQ ID NO: 4332 - DNA, 129 bp, Artificial Sequence
  Description of Artificial Sequence: Synthetic antibody
tgggacaacgccaacaactcactgtatctgcaaatgaacagcctgagagccgaggacacggccgtgtattactgtgcgagagtcaagtacggttttggcctctacggtatggacgtctggggccaaggg

SEQ ID NO: 4333 - protein, 43 aa, Artificial Sequence
  Description of Artificial Sequence: Synthetic antibody
WDNANNSLYLQMNSLRAEDTAVYYCARVKYGFGLYGMDVWGQG

SEQ ID NO: 4334 - DNA, 129 bp, Artificial Sequence
  Description of Artificial Sequence: Synthetic antibody
agggacaacgccaagaactcactgtatctgcaaatgaacagcctgagagccgaggacacggccgtgtattactgtgcgagagtcaagtacggttttggcctctacggtatggacgtctggggccaaggg

SEQ ID NO: 4335 - protein, 43 aa, Artificial Sequence
  Description of Artificial Sequence: Synthetic antibody
RDNAKNSLYLQMNSLRAEDTAVYYCARVKYGFGLYGMDVWGQG

SEQ ID NO: 4336 - protein, 17 aa, Artificial Sequence
  Description of Artificial Sequence: Synthetic antibody
CARGEPRSGSYYWFDYW

SEQ ID NO: 4337 - DNA, 129 bp, Artificial Sequence
  Description of Artificial Sequence: Synthetic antibody
cacaaatccaagaacacgctgtatcttcaaatgaacagcctgagagcggaggacacggccgtgtattactgtgcgagaggtgagcctcgcagtgggagctactactggtttgactactggggccaggga

SEQ ID NO: 4338 - protein, 43 aa, Artificial Sequence
  Description of Artificial Sequence: Synthetic antibody
HKSKNTLYLQMNSLRAEDTAVYYCARGEPRSGSYYWFDYWGQG

SEQ ID NO: 4339 - DNA, 129 bp, Artificial Sequence
  Description of Artificial Sequence: Synthetic antibody
gacaaatccaagaacacgctgtatcttcaaatgaacagcctgagagcggaggacacggccgtgtattactgtgcgagaggtgagcctcgcagtgggagctactactggtttgactactggggccaggga

SEQ ID NO: 4340 - protein, 43 aa, Artificial Sequence
  Description of Artificial Sequence: Synthetic antibody
DKSKNTLYLQMNSLRAEDTAVYYCARGEPRSGSYYWFDYWGQG

SEQ ID NO: 4341 - DNA, 129 bp, Artificial Sequence
  Description of Artificial Sequence: Synthetic antibody
cacaaatccaacaacacgctgtatcttcaaatgaacagcctgagagcggaggacacggccgtgtattactgtgcgagaggtgagcctcgcagtgggagctactactggtttgactactggggccaggga

SEQ ID NO: 4342 - protein, 43 aa, Artificial Sequence
  Description of Artificial Sequence: Synthetic antibody
HKSNNTLYLQMNSLRAEDTAVYYCARGEPRSGSYYWFDYWGQG

SEQ ID NO: 4343 - protein, 12 aa, Artificial Sequence
  Description of Artificial Sequence: Synthetic antibody
CAKDVDIVAVPW

SEQ ID NO: 4344 - DNA, 129 bp, Artificial Sequence
  Description of Artificial Sequence: Synthetic antibody
ttcgccatctccagagacaattccaagaacacgctgtatctgcaaatgaacagcctgagagccgagggcacggccgtatattactgtgcgaaagacgtggatatagtggctgtcccgtggggccaggga

SEQ ID NO: 4345 - protein, 43 aa, Artificial Sequence
  Description of Artificial Sequence: Synthetic antibody
FAISRDNSKNTLYLQMNSLRAEGTAVYYCAKDVDIVAVPWGQG

SEQ ID NO: 4346 - DNA, 129 bp, Artificial Sequence
  Description of Artificial Sequence: Synthetic antibody
ttcaccatctccagagacaattccaagaacacgctgtatctgcaaatgaacagcctgagagccgaggacacggccgtatattactgtgcgaaagacgtggatatagtggctgtcccgtggggccaggga

SEQ ID NO: 4347 - protein, 43 aa, Artificial Sequence
  Description of Artificial Sequence: Synthetic antibody
FTISRDNSKNTLYLQMNSLRAEDTAVYYCAKDVDIVAVPWGQG

SEQ ID NO: 4348 - DNA, 129 bp, Artificial Sequence
  Description of Artificial Sequence: Synthetic antibody
ttcaccatctccagacacaattccaacaacacgctgtatctgcaaatgaacagcctgagagccgaggacacggccgtatattactgtgcgaaagacgtggatatagtggctgtcccgtggggccaggga

SEQ ID NO: 4349 - protein, 43 aa, Artificial Sequence
  Description of Artificial Sequence: Synthetic antibody
FTISRHNSNNTLYLQMNSLRAEDTAVYYCAKDVDIVAVPWGQG

SEQ ID NO: 4350 - protein, 13 aa, Artificial Sequence
  Description of Artificial Sequence: Synthetic antibody
CAKESGSYSFDYW

SEQ ID NO: 4351 - DNA, 129 bp, Artificial Sequence
  Description of Artificial Sequence: Synthetic antibody
accatctccagagacaattccaagaacacgctgtatctgcaaatgaacagcctgagagccgagggcacggccgtatattactgtgcgaaagaaagtgggagctactcatttgactactggggccaggga

SEQ ID NO: 4352 - protein, 43 aa, Artificial Sequence
  Description of Artificial Sequence: Synthetic antibody
TISRDNSKNTLYLQMNSLRAEGTAVYYCAKESGSYSFDYWGQG

SEQ ID NO: 4353 - DNA, 129 bp, Artificial Sequence
  Description of Artificial Sequence: Synthetic antibody
accatctccagagacaattccaagaacacgctgtatctgcaaatgaacagcctgagagccgaggacacggccgtatattactgtgcgaaagaaagtgggagctactcatttgactactggggccaggga

SEQ ID NO: 4354 - protein, 43 aa, Artificial Sequence
  Description of Artificial Sequence: Synthetic antibody
TISRDNSKNTLYLQMNSLRAEDTAVYYCAKESGSYSFDYWGQG

SEQ ID NO: 4355 - DNA, 129 bp, Artificial Sequence
  Description of Artificial Sequence: Synthetic antibody
accatctccagacacaattccaagaacacgctgtatctgcaaatgaacagcctgagagccgaggacacggccgtatattactgtgcgaaagaaagtgggagctactcatttgactactggggccaggga

SEQ ID NO: 4356 - protein, 43 aa, Artificial Sequence
  Description of Artificial Sequence: Synthetic antibody
TISRHNSKNTLYLQMNSLRAEDTAVYYCAKESGSYSFDYWGQG

SEQ ID NO: 4357 - protein, 21 aa, Artificial Sequence
  Description of Artificial Sequence: Synthetic antibody
CARERGSSWPRDYYYYGMDVW

SEQ ID NO: 4358 - DNA, 129 bp, Artificial Sequence
  Description of Artificial Sequence: Synthetic antibody
tgcacagcctacttggagctgaggagcctgagatctgacgacacggccgtgtattactgtgcgagagagaggggcagcagctggcctcgggactactactactacggtatggacgtctggggccaaggg

SEQ ID NO: 4359 - protein, 43 aa, Artificial Sequence
  Description of Artificial Sequence: Synthetic antibody
CTAYLELRSLRSDDTAVYYCARERGSSWPRDYYYYGMDVWGQG

SEQ ID NO: 4360 - DNA, 129 bp, Artificial Sequence
  Description of Artificial Sequence: Synthetic antibody
tgcacagcctacatggagctgaggagcctgagatctgacgacacggccgtgtattactgtgcgagagagaggggcagcagctggcctcgggactactactactacggtatggacgtctggggccaaggg

SEQ ID NO: 4361 - protein, 43 aa, Artificial Sequence
  Description of Artificial Sequence: Synthetic antibody
CTAYMELRSLRSDDTAVYYCARERGSSWPRDYYYYGMDVWGQG

SEQ ID NO: 4362 - DNA, 129 bp, Artificial Sequence
  Description of Artificial Sequence: Synthetic antibody
agcacagcctacatggagctgaggagcctgagatctgacgacacggccgtgtattactgtgcgagagagaggggcagcagctggcctcgggactactactactacggtatggacgtctggggccaaggg

SEQ ID NO: 4363 - protein, 43 aa, Artificial Sequence
  Description of Artificial Sequence: Synthetic antibody
STAYMELRSLRSDDTAVYYCARERGSSWPRDYYYYGMDVWGQG

SEQ ID NO: 4364 - protein, 17 aa, Artificial Sequence
  Description of Artificial Sequence: Synthetic antibody
CARGNFMTGTPGAFDIW

SEQ ID NO: 4365 - DNA, 129 bp, Artificial Sequence
  Description of Artificial Sequence: Synthetic antibody
gacacgtccgagaaccagttctccctgaagctgacctctgtgaccgccgcggacacgactgtatattactgtgcgagaggcaattttatgactggaaccccaggggcttttgatatctggggccaaggg

SEQ ID NO: 4366 - protein, 43 aa, Artificial Sequence
  Description of Artificial Sequence: Synthetic antibody
DTSENQFSLKLTSVTAADTTVYYCARGNFMTGTPGAFDIWGQG

SEQ ID NO: 4367 - DNA, 129 bp, Artificial Sequence
  Description of Artificial Sequence: Synthetic antibody
cacacgtccgagaaccagttctccctgaagctgacctctgtgaccgccgcggacacgactgtatattactgtgcgagaggcaattttatgactggaaccccaggggcttttgatatctggggccaaggg

SEQ ID NO: 4368 - protein, 43 aa, Artificial Sequence
  Description of Artificial Sequence: Synthetic antibody
HTSENQFSLKLTSVTAADTTVYYCARGNFMTGTPGAFDIWGQG

SEQ ID NO: 4369 - DNA, 129 bp, Artificial Sequence
  Description of Artificial Sequence: Synthetic antibody
cacacgtccgacaaccagttctccctgaagctgacctctgtgaccgccgcggacacgactgtatattactgtgcgagaggcaattttatgactggaaccccaggggcttttgatatctggggccaaggg

SEQ ID NO: 4370 - protein, 43 aa, Artificial Sequence
  Description of Artificial Sequence: Synthetic antibody
HTSDNQFSLKLTSVTAADTTVYYCARGNFMTGTPGAFDIWGQG

SEQ ID NO: 4371 - protein, 15 aa, Artificial Sequence
  Description of Artificial Sequence: Synthetic antibody
CTRGGVGGVSAPYDW

SEQ ID NO: 4372 - DNA, 129 bp, Artificial Sequence
  Description of Artificial Sequence: Synthetic antibody
gccagagacaattccaagaacacgctgtatcttcaaatgaaccgcctgagagccgaggacacgggcgtgtatttatgtacgagagggggtgtagggggggttagtgccccttacgactggggcctggga

SEQ ID NO: 4373 - protein, 43 aa, Artificial Sequence
  Description of Artificial Sequence: Synthetic antibody
ARDNSKNTLYLQMNRLRAEDTGVYLCTRGGVGGVSAPYDWGLG

SEQ ID NO: 4374 - DNA, 129 bp, Artificial Sequence
  Description of Artificial Sequence: Synthetic antibody
gccagagacaattccaagaacacgctgtatcttcaaatgaacagcctgagagccgaggacacgggcgtgtatttatgtacgagagggggtgtagggggggttagtgccccttacgactggggcctggga

SEQ ID NO: 4375 - protein, 43 aa, Artificial Sequence
  Description of Artificial Sequence: Synthetic antibody
ARDNSKNTLYLQMNSLRAEDTGVYLCTRGGVGGVSAPYDWGLG

SEQ ID NO: 4376 - DNA, 129 bp, Artificial Sequence
  Description of Artificial Sequence: Synthetic antibody
gccagagacaattccaagaacacgctgtatcttcaaatgaacagcctgagagccgaggacacgggcgtgtatttatgtacgagagggggggtagggggggttagtgccccttacgactggggcctggga

SEQ ID NO: 4377 - protein, 14 aa, Artificial Sequence
  Description of Artificial Sequence: Synthetic antibody
CAKNHLGMYYFDYW

SEQ ID NO: 4378 - DNA, 129 bp, Artificial Sequence
  Description of Artificial Sequence: Synthetic antibody
atctccatatataattccaagaacacgctgtatctgcaaatgaacagcctgagagccgaggacacggccgtatattactgtgcgaaaaaccatcttgggatgtactactttgactactggggccaggga

SEQ ID NO: 4379 - protein, 43 aa, Artificial Sequence
  Description of Artificial Sequence: Synthetic antibody
ISIYNSKNTLYLQMNSLRAEDTAVYYCAKNHLGMYYFDYWGQG

SEQ ID NO: 4380 - DNA, 129 bp, Artificial Sequence
  Description of Artificial Sequence: Synthetic antibody
atctccatagataattccaagaacacgctgtatctgcaaatgaacagcctgagagccgaggacacggccgtatattactgtgcgaaaaaccatcttgggatgtactactttgactactggggccaggga

SEQ ID NO: 4381 - protein, 43 aa, Artificial Sequence
  Description of Artificial Sequence: Synthetic antibody
ISIDNSKNTLYLQMNSLRAEDTAVYYCAKNHLGMYYFDYWGQG

SEQ ID NO: 4382 - DNA, 129 bp, Artificial Sequence
  Description of Artificial Sequence: Synthetic antibody
atctccagagataattccaagaacacgctgtatctgcaaatgaacagcctgagagccgaggacacggccgtatattactgtgcgaaaaaccatcttgggatgtactactttgactactggggccaggga

SEQ ID NO: 4383 - protein, 43 aa, Artificial Sequence
  Description of Artificial Sequence: Synthetic antibody
ISRDNSKNTLYLQMNSLRAEDTAVYYCAKNHLGMYYFDYWGQG

SEQ ID NO: 4384 - protein, 15 aa, Artificial Sequence
  Description of Artificial Sequence: Synthetic antibody
CAKDQRGLVNGMDVW

SEQ ID NO: 4385 - DNA, 129 bp, Artificial Sequence
  Description of Artificial Sequence: Synthetic antibody
ctccagagacaacgccagaattccgtgtatttgcaaatgaacagtctgagaattgaggacacggccctatattattgtgctaaggatcagcggggtctggtgaatggtatggacgtctggggccaaggg

SEQ ID NO: 4386 - protein, 43 aa, Artificial Sequence
  Description of Artificial Sequence: Synthetic antibody
LQRQRQNSVYLQMNSLRIEDTALYYCAKDQRGLVNGMDVWGQG

SEQ ID NO: 4387 - DNA, 129 bp, Artificial Sequence
  Description of Artificial Sequence: Synthetic antibody
tccagagacaacgccaagaattccgtgtatttgcaaatgaacagtctgataattgaggacacggccctatattattgtgctaaggatcagcggggtctggtgaatggtatggacgtctggggccaaggg

SEQ ID NO: 4388 - protein, 43 aa, Artificial Sequence
  Description of Artificial Sequence: Synthetic antibody
SRDNAKNSVYLQMNSLIIEDTALYYCAKDQRGLVNGMDVWGQG

SEQ ID NO: 4389 - DNA, 129 bp, Artificial Sequence
  Description of Artificial Sequence: Synthetic antibody
tccagagacaacgccaagaattccgtgtatttgcaaatgaacagtctgagaattgaggacacggccctatattattgtgctaaggatcagcggggtctggtgaatggtatggacgtctggggccaaggg

SEQ ID NO: 4390 - protein, 43 aa, Artificial Sequence
  Description of Artificial Sequence: Synthetic antibody
SRDNAKNSVYLQMNSLRIEDTALYYCAKDQRGLVNGMDVWGQG

SEQ ID NO: 4391 - protein, 21 aa, Artificial Sequence
  Description of Artificial Sequence: Synthetic antibody
CVRGASQYYGSEKYLYYFDYW

SEQ ID NO: 4392 - DNA, 129 bp, Artificial Sequence
  Description of Artificial Sequence: Synthetic antibody
tgcacagcctacttggaggtgagcagcctgagatcagacgacacggccgtgtattactgtgtgagaggcgccagtcaatactatggctcagaaaaatatttgtactactttgactactggggccaggga

SEQ ID NO: 4393 - protein, 43 aa, Artificial Sequence
  Description of Artificial Sequence: Synthetic antibody
CTAYLEVSSLRSDDTAVYYCVRGASQYYGSEKYLYYFDYWGQG

SEQ ID NO: 4394 - DNA, 129 bp, Artificial Sequence
  Description of Artificial Sequence: Synthetic antibody
tgcacagcctacatggaggtgagcagcctgagatcagacgacacggccgtgtattactgtgtgagaggcgccagtcaatactatggctcagaaaaatatttgtactactttgactactggggccaggga

SEQ ID NO: 4395 - protein, 43 aa, Artificial Sequence
  Description of Artificial Sequence: Synthetic antibody
CTAYMEVSSLRSDDTAVYYCVRGASQYYGSEKYLYYFDYWGQG

SEQ ID NO: 4396 - DNA, 129 bp, Artificial Sequence
  Description of Artificial Sequence: Synthetic antibody
agcacagcctacatggaggtgagcagcctgagatcagacgacacggccgtgtattactgtgtgagaggcgccagtcaatactatggctcagaaaaatatttgtactactttgactactggggccaggga

SEQ ID NO: 4397 - protein, 43 aa, Artificial Sequence
  Description of Artificial Sequence: Synthetic antibody
STAYMEVSSLRSDDTAVYYCVRGASQYYGSEKYLYYFDYWGQG

SEQ ID NO: 4398 - protein, 21 aa, Artificial Sequence
  Description of Artificial Sequence: Synthetic antibody
CARDLGYSSSWGGAGNWFDPW

SEQ ID NO: 4399 - DNA, 129 bp, Artificial Sequence
  Description of Artificial Sequence: Synthetic antibody
tgcacagtctacatggagctgagcagcctgagatctgaggacacggccgtgtattactgtgcgagagatcttgggtatagcagcagctggggaggggcgggaaactggttcgacccctggggccaggga

SEQ ID NO: 4400 - protein, 43 aa, Artificial Sequence
  Description of Artificial Sequence: Synthetic antibody
CTVYMELSSLRSEDTAVYYCARDLGYSSSWGGAGNWFDPWGQG

SEQ ID NO: 4401 - DNA, 129 bp, Artificial Sequence
  Description of Artificial Sequence: Synthetic antibody
agcacagtctacttggagctgagcagcctgagatctgaggacacggccgtgtattactgtgcgagagatcttgggtatagcagcagctggggaggggcgggaaactggttcgacccctggggccaggga

SEQ ID NO: 4402 - protein, 43 aa, Artificial Sequence
  Description of Artificial Sequence: Synthetic antibody
STVYLELSSLRSEDTAVYYCARDLGYSSSWGGAGNWFDPWGQG

SEQ ID NO: 4403 - DNA, 129 bp, Artificial Sequence
  Description of Artificial Sequence: Synthetic antibody
agcacagtctacatggagctgagcagcctgagatctgaggacacggccgtgtattactgtgcgagagatcttgggtatagcagcagctggggaggggcgggaaactggttcgacccctggggccaggga

SEQ ID NO: 4404 - protein, 43 aa, Artificial Sequence
  Description of Artificial Sequence: Synthetic antibody
STVYMELSSLRSEDTAVYYCARDLGYSSSWGGAGNWFDPWGQG

SEQ ID NO: 4405 - protein, 13 aa, Artificial Sequence
  Description of Artificial Sequence: Synthetic antibody
CARGYALDGMDVW

SEQ ID NO: 4406 - DNA, 129 bp, Artificial Sequence
  Description of Artificial Sequence: Synthetic antibody
accatgaccaggaacacctccataagcacagcctacatggagctgagcagcctgagatctgaggacacggccgtgtattactgtgcgagaggttacgccttggacggtatggacgtctggggccaaggg

SEQ ID NO: 4407 - protein, 43 aa, Artificial Sequence
  Description of Artificial Sequence: Synthetic antibody
TMTRNTSISTAYMELSSLRSEDTAVYYCARGYALDGMDVWGQG

SEQ ID NO: 4408 - DNA, 129 bp, Artificial Sequence
  Description of Artificial Sequence: Synthetic antibody
accatgaccagcaacacctccataagcacagcctacatggagctgagcagcctgagatctgaggacacggccgtgtattactgtgcgagaggttacgccttggacggtatggacgtctggggccaaggg

SEQ ID NO: 4409 - protein, 43 aa, Artificial Sequence
  Description of Artificial Sequence: Synthetic antibody
TMTSNTSISTAYMELSSLRSEDTAVYYCARGYALDGMDVWGQG

SEQ ID NO: 4410 - DNA, 129 bp, Artificial Sequence
  Description of Artificial Sequence: Synthetic antibody
accatgaccagcaacacctccataaccacagcctacatggagctgagcagcctgagatctgaggacacggccgtgtattactgtgcgagaggttacgccttggacggtatggacgtctggggccaaggg

SEQ ID NO: 4411 - protein, 43 aa, Artificial Sequence
  Description of Artificial Sequence: Synthetic antibody
TMTSNTSITTAYMELSSLRSEDTAVYYCARGYALDGMDVWGQG

SEQ ID NO: 4412 - protein, 12 aa, Artificial Sequence
  Description of Artificial Sequence: Synthetic antibody
CAREDGNVLDYW

SEQ ID NO: 4413 - DNA, 129 bp, Artificial Sequence
  Description of Artificial Sequence: Synthetic antibody
ttaaccgtcagtccggacacatccaagaacctgttctccctgcagttgcagtctgtggttcccgacgatacggctgtgtattactgtgccagagaagacggcaatgtccttgactactggggccaggga

SEQ ID NO: 4414 - protein, 43 aa, Artificial Sequence
  Description of Artificial Sequence: Synthetic antibody
LTVSPDTSKNLFSLQLQSVVPDDTAVYYCAREDGNVLDYWGQG

SEQ ID NO: 4415 - DNA, 129 bp, Artificial Sequence
  Description of Artificial Sequence: Synthetic antibody
ataaccgtccgtccgcacacatccaagaaccagttctccctgcagttgcagtctgtggttcccgacgatacggctgtgtattactgtgccagagaagacggcaatgtccttgactactggggccaggga

SEQ ID NO: 4416 - protein, 43 aa, Artificial Sequence
  Description of Artificial Sequence: Synthetic antibody
ITVRPHTSKNQFSLQLQSVVPDDTAVYYCAREDGNVLDYWGQG

SEQ ID NO: 4417 - DNA, 129 bp, Artificial Sequence
  Description of Artificial Sequence: Synthetic antibody
ataaccgtcagtccggacacatccaagaaccagttctccctgcagttgcagtctgtggttcccgacgatacggctgtgtattactgtgccagagaagacggcaatgtccttgactactggggccaggga

SEQ ID NO: 4418 - protein, 43 aa, Artificial Sequence
  Description of Artificial Sequence: Synthetic antibody
ITVSPDTSKNQFSLQLQSVVPDDTAVYYCAREDGNVLDYWGQG

SEQ ID NO: 4419 - protein, 19 aa, Artificial Sequence
  Description of Artificial Sequence: Synthetic antibody
CAKTHYYDSSGSWVHFDYW

SEQ ID NO: 4420 - DNA, 129 bp, Artificial Sequence
  Description of Artificial Sequence: Synthetic antibody
tccaataatacgctgtatctgcaaatgaacggcctgagagccgaggacacggccgtatattactgtgcgaaaacccattactatgatagtagtggttcctgggtccactttgactactggggccaggga

SEQ ID NO: 4421 - protein, 43 aa, Artificial Sequence
  Description of Artificial Sequence: Synthetic antibody
SNNTLYLQMNGLRAEDTAVYYCAKTHYYDSSGSWVHFDYWGQG

SEQ ID NO: 4422 - DNA, 129 bp, Artificial Sequence
  Description of Artificial Sequence: Synthetic antibody
tccaagaatacgctgtatctgcaaatgaacagcctgagagccgaggacacggccgtatattactgtgcgaaaacccattactatgatagtagtggttcctgggtccactttgactactggggccaggga

SEQ ID NO: 4423 - protein, 43 aa, Artificial Sequence
  Description of Artificial Sequence: Synthetic antibody
SKNTLYLQMNSLRAEDTAVYYCAKTHYYDSSGSWVHFDYWGQG

SEQ ID NO: 4424 - DNA, 129 bp, Artificial Sequence
  Description of Artificial Sequence: Synthetic antibody
tccaagaatacgctgtatctgcaaatgaacagcctgagagccgaggacacggccgtacattactgtgcgaaaacccattactatgatagtagtggttcctgggtccactttgactactggggccaggga

SEQ ID NO: 4425 - protein, 43 aa, Artificial Sequence
  Description of Artificial Sequence: Synthetic antibody
SKNTLYLQMNSLRAEDTAVHYCAKTHYYDSSGSWVHFDYWGQG

SEQ ID NO: 4426 - protein, 14 aa, Artificial Sequence
  Description of Artificial Sequence: Synthetic antibody
CARAISTRGYFDYW

SEQ ID NO: 4427 - DNA, 129 bp, Artificial Sequence
  Description of Artificial Sequence: Synthetic antibody
catctccagagaaatgccaagaactccttgtatcttcaaatgaacagcctgagagccggggacacggctgtgtattactgtgcaagagccatctccacccgggggtactttgactactggggccaggga

SEQ ID NO: 4428 - protein, 43 aa, Artificial Sequence
  Description of Artificial Sequence: Synthetic antibody
HLQRNAKNSLYLQMNSLRAGDTAVYYCARAISTRGYFDYWGQG

SEQ ID NO: 4429 - DNA, 129 bp, Artificial Sequence
  Description of Artificial Sequence: Synthetic antibody
atctccatagaaaatgccaagaactccttgtatcttcaaatgaacagcctgagagccggtgacacggctgtgtattactgtgcaagagccatctccacccgggggtactttgactactggggccaggga

SEQ ID NO: 4430 - protein, 43 aa, Artificial Sequence
  Description of Artificial Sequence: Synthetic antibody
ISIENAKNSLYLQMNSLRAGDTAVYYCARAISTRGYFDYWGQG

SEQ ID NO: 4431 - DNA, 129 bp, Artificial Sequence
  Description of Artificial Sequence: Synthetic antibody
atctccagagaaaatgccaagaactccttgtatcttcaaatgaacagcctgagagccggggacacggctgtgtattactgtgcaagagccatctccacccgggggtactttgactactggggccaggga

SEQ ID NO: 4432 - protein, 43 aa, Artificial Sequence
  Description of Artificial Sequence: Synthetic antibody
ISRENAKNSLYLQMNSLRAGDTAVYYCARAISTRGYFDYWGQG

SEQ ID NO: 4433 - protein, 20 aa, Artificial Sequence
  Description of Artificial Sequence: Synthetic antibody
CTRQSDYYDSSGTKTTFDYW

SEQ ID NO: 4434 - DNA, 129 bp, Artificial Sequence
  Description of Artificial Sequence: Synthetic antibody
aagaacacggcgtatctgcaaatgaacagcctgaaaaccgaggacacggccgtgtattactgtactagacaatccgattactatgatagtagtggtaccaaaacgacttttgactactggggccaggga

SEQ ID NO: 4435 - protein, 43 aa, Artificial Sequence
  Description of Artificial Sequence: Synthetic antibody
KNTAYLQMNSLKTEDTAVYYCTRQSDYYDSSGTKTTFDYWGQG

SEQ ID NO: 4436 - DNA, 129 bp, Artificial Sequence
  Description of Artificial Sequence: Synthetic antibody
aacaacacggcgtatctgcaaatgaacagccttaaaaccgaggacacggccgtgtattactgtactagacaatccgattactatgatagtagtggtaccaaaacgacttttgactactggggccaggga

SEQ ID NO: 4437 - protein, 43 aa, Artificial Sequence
  Description of Artificial Sequence: Synthetic antibody
NNTAYLQMNSLKTEDTAVYYCTRQSDYYDSSGTKTTFDYWGQG

SEQ ID NO: 4438 - DNA, 129 bp, Artificial Sequence
  Description of Artificial Sequence: Synthetic antibody
aacaacacggcgtatctgcaaatgaacagcctgaaacccgaggacacggccgtgtattactgtactagacaatccgattactatgatagtagtggtaccaaaacgacttttgactactggggccaggga

SEQ ID NO: 4439 - protein, 43 aa, Artificial Sequence
  Description of Artificial Sequence: Synthetic antibody
NNTAYLQMNSLKPEDTAVYYCTRQSDYYDSSGTKTTFDYWGQG

SEQ ID NO: 4440 - protein, 16 aa, Artificial Sequence
  Description of Artificial Sequence: Synthetic antibody
CASPDPLGSVADLDYW

SEQ ID NO: 4441 - DNA, 129 bp, Artificial Sequence
  Description of Artificial Sequence: Synthetic antibody
tgggacacatccgcgagcacagcctacatggagctgagcagcctgagatctgaagacacggctgtgtattactgtgcgagtccggaccccttgggttcagtggctgaccttgactactggggccaggga

SEQ ID NO: 4442 - protein, 43 aa, Artificial Sequence
  Description of Artificial Sequence: Synthetic antibody
WDTSASTAYMELSSLRSEDTAVYYCASPDPLGSVADLDYWGQG

SEQ ID NO: 4443 - DNA, 129 bp, Artificial Sequence
  Description of Artificial Sequence: Synthetic antibody
agtgacaggtccgtgagcacagcctacatggagctgagcagcctgagatctgaagacacggctgtgtattactgtgcgagtccggaccccttgggttcagtggctgaccttgactactggggccaggga

SEQ ID NO: 4444 - protein, 43 aa, Artificial Sequence
  Description of Artificial Sequence: Synthetic antibody
SDRSVSTAYMELSSLRSEDTAVYYCASPDPLGSVADLDYWGQG

SEQ ID NO: 4445 - DNA, 129 bp, Artificial Sequence
  Description of Artificial Sequence: Synthetic antibody
agggacacatccgcgagcacagcctacatggagctgagcagcctgagatctgaagacacggctgtgtattactgtgcgagtccggaccccttgggttcagtggctgaccttgactactggggccaggga

SEQ ID NO: 4446 - protein, 43 aa, Artificial Sequence
  Description of Artificial Sequence: Synthetic antibody
RDTSASTAYMELSSLRSEDTAVYYCASPDPLGSVADLDYWGQG

SEQ ID NO: 4447 - protein, 18 aa, Artificial Sequence
  Description of Artificial Sequence: Synthetic antibody
CARPHSPGGSYPNYFDYW

SEQ ID NO: 4448 - DNA, 129 bp, Artificial Sequence
  Description of Artificial Sequence: Synthetic antibody
acgtccatcagtaccgcctacctgcagtggggcagcctgaaggcctcggacaccgccatctattactgtgcgagaccccattcccccggtgggagctacccaaattactttgactactggggccaggga

SEQ ID NO: 4449 - protein, 43 aa, Artificial Sequence
  Description of Artificial Sequence: Synthetic antibody
TSISTAYLQWGSLKASDTAIYYCARPHSPGGSYPNYFDYWGQG

SEQ ID NO: 4450 - DNA, 129 bp, Artificial Sequence
  Description of Artificial Sequence: Synthetic antibody
acgtccatcagcaccgcctacctgcagtggggcagcctgaaggcctcggacaccgccatctattactgtgcgagaccccattcccccggtgggagctacccaaattactttgactactggggccaggga

SEQ ID NO: 4451 - DNA, 129 bp, Artificial Sequence
  Description of Artificial Sequence: Synthetic antibody
aagtccatcagcaccgcctacctgcagtggggcagcctgaaggcctcggacaccgccatctattactgtgcgagaccccattcccccggtgggagctacccgaattactttgactactggggccaggga

SEQ ID NO: 4452 - protein, 43 aa, Artificial Sequence
  Description of Artificial Sequence: Synthetic antibody
KSISTAYLQWGSLKASDTAIYYCARPHSPGGSYPNYFDYWGQG

SEQ ID NO: 4453 - protein, 18 aa, Artificial Sequence
  Description of Artificial Sequence: Synthetic antibody
CARAGRMRGVRPGGMDVW

SEQ ID NO: 4454 - DNA, 129 bp, Artificial Sequence
  Description of Artificial Sequence: Synthetic antibody
tatgccaagaactccttgtatcttcaaatgaacagcctgagagccggggacacggctgtgtattactgtgcaagagcagggcgtatgcggggagttcggccggggggtatggacgtctggggccaaggg

SEQ ID NO: 4455 - protein, 43 aa, Artificial Sequence
  Description of Artificial Sequence: Synthetic antibody
YAKNSLYLQMNSLRAGDTAVYYCARAGRMRGVRPGGMDVWGQG

SEQ ID NO: 4456 - DNA, 129 bp, Artificial Sequence
  Description of Artificial Sequence: Synthetic antibody
aatgccaagaactccttgtatcttcaaatgaacagcctgagagccggggacacggctgtgtattactgtgcaagagcaggtcgtatgcggggagttcggccggggggtatggacgtctggggccaaggg

SEQ ID NO: 4457 - protein, 43 aa, Artificial Sequence
  Description of Artificial Sequence: Synthetic antibody
NAKNSLYLQMNSLRAGDTAVYYCARAGRMRGVRPGGMDVWGQG

SEQ ID NO: 4458 - DNA, 129 bp, Artificial Sequence
  Description of Artificial Sequence: Synthetic antibody
aatgccaagaactccttgtatcttcaaatgaacagcctgagagccggggacacggctgtgtattactgtgcaagagcagggcgtatgcggggagtgcggccggggggtatggacgtctggggccaaggg

SEQ ID NO: 4459 - protein, 13 aa, Artificial Sequence
  Description of Artificial Sequence: Synthetic antibody
CARVGSGWYEDYW

SEQ ID NO: 4460 - DNA, 129 bp, Artificial Sequence
  Description of Artificial Sequence: Synthetic antibody
accatctccatacacaattccaagaacacgctgtatcttcaaatgaacagcctgagagccgaggacacggccgtgtattactgtgcgagagtcggcagtggctggtacgaggactactggggccaggga

SEQ ID NO: 4461 - protein, 43 aa, Artificial Sequence
  Description of Artificial Sequence: Synthetic antibody
TISIHNSKNTLYLQMNSLRAEDTAVYYCARVGSGWYEDYWGQG

SEQ ID NO: 4462 - DNA, 129 bp, Artificial Sequence
  Description of Artificial Sequence: Synthetic antibody
accatctccagagacaattccaagaacacgctgtatcttcaaatgaacagcctgagagccgaggacacggccgtgtattactgtgcgagagtcggcagtggctggtacgaggactactggggccaggga

SEQ ID NO: 4463 - protein, 43 aa, Artificial Sequence
  Description of Artificial Sequence: Synthetic antibody
TISRDNSKNTLYLQMNSLRAEDTAVYYCARVGSGWYEDYWGQG

SEQ ID NO: 4464 - DNA, 129 bp, Artificial Sequence
  Description of Artificial Sequence: Synthetic antibody
accatctccagacacaattccaacaacacgctgtatcttcaaatgaacagcctgagagccgaggacacggccgtgtattactgtgcgagagtcggcagtggctggtacgaggactactggggccaggga

SEQ ID NO: 4465 - protein, 43 aa, Artificial Sequence
  Description of Artificial Sequence: Synthetic antibody
TISRHNSNNTLYLQMNSLRAEDTAVYYCARVGSGWYEDYWGQG

SEQ ID NO: 4466 - protein, 18 aa, Artificial Sequence
  Description of Artificial Sequence: Synthetic antibody
CARDPWTGTTPTRAIDIW

SEQ ID NO: 4467 - DNA, 129 bp, Artificial Sequence
  Description of Artificial Sequence: Synthetic antibody
acatccacgtgcacaggctacttggagctgaggagcctgagatttgacgacacggccgtgtattattgtgcgagagacccgtggactggaacgacgccaacgcgtgctattgatatctggggccaaggg

SEQ ID NO: 4468 - protein, 43 aa, Artificial Sequence
  Description of Artificial Sequence: Synthetic antibody
TSTCTGYLELRSLRFDDTAVYYCARDPWTGTTPTRAIDIWGQG

SEQ ID NO: 4469 - DNA, 129 bp, Artificial Sequence
  Description of Artificial Sequence: Synthetic antibody
acatccacgagcacaggctacttggagctgaggagcctgagatttgacgacacggccgtgtattattgtgcgagagacccgtggactggaacgacgccaacgcgtgctattgatatctggggccaaggg

SEQ ID NO: 4470 - protein, 43 aa, Artificial Sequence
  Description of Artificial Sequence: Synthetic antibody
TSTSTGYLELRSLRFDDTAVYYCARDPWTGTTPTRAIDIWGQG

SEQ ID NO: 4471 - DNA, 129 bp, Artificial Sequence
  Description of Artificial Sequence: Synthetic antibody
acatccacgagcacaggctacatggagctgaggagcctgagatttgacgacacggccgtgtattattgtgcgagagacccgtggactggaacgacgccaacgcgtgctattgatatctggggccaaggg

SEQ ID NO: 4472 - protein, 43 aa, Artificial Sequence
  Description of Artificial Sequence: Synthetic antibody
TSTSTGYMELRSLRFDDTAVYYCARDPWTGTTPTRAIDIWGQG

SEQ ID NO: 4473 - protein, 16 aa, Artificial Sequence
  Description of Artificial Sequence: Synthetic antibody
CARADGTGYYLYFDYW

SEQ ID NO: 4474 - DNA, 129 bp, Artificial Sequence
  Description of Artificial Sequence: Synthetic antibody
gtagacaggcccaagaaccagttctccctgaagctgagctctgtgaccgccgcggacacggccgtgtattactgtgccagagctgacgggactggttattacctctactttgactactggggccaggga

SEQ ID NO: 4475 - protein, 43 aa, Artificial Sequence
  Description of Artificial Sequence: Synthetic antibody
VDRPKNQFSLKLSSVTAADTAVYYCARADGTGYYLYFDYWGQG

SEQ ID NO: 4476 - DNA, 129 bp, Artificial Sequence
  Description of Artificial Sequence: Synthetic antibody
gtagacaggtccaagaaccagttctccctgaagctgagctctgtgaccgccgcggacacggccgtgtattactgtgccagagctgacgggactggttattacctctactttgactactggggccaggga

SEQ ID NO: 4477 - protein, 43 aa, Artificial Sequence
  Description of Artificial Sequence: Synthetic antibody
VDRSKNQFSLKLSSVTAADTAVYYCARADGTGYYLYFDYWGQG

SEQ ID NO: 4478 - DNA, 129 bp, Artificial Sequence
  Description of Artificial Sequence: Synthetic antibody
gtagacaggcccaacaaccagttctccctgaagctgagctctgtgaccgccgcggacacggccgtgtattactgtgccagagctgacgggactggttattacctctactttgactactggggccaggga

SEQ ID NO: 4479 - protein, 43 aa, Artificial Sequence
  Description of Artificial Sequence: Synthetic antibody
VDRPNNQFSLKLSSVTAADTAVYYCARADGTGYYLYFDYWGQG

SEQ ID NO: 4480 - protein, 13 aa, Artificial Sequence
  Description of Artificial Sequence: Synthetic antibody
CTTEGSYFLFDPW

SEQ ID NO: 4481 - DNA, 129 bp, Artificial Sequence
  Description of Artificial Sequence: Synthetic antibody
accatctcaagagatgattcaaaaaacacgctgtatctgcaaatgaacagcctgaaaaccgaggacacagccgtgtattactgtaccacagaggggtcgtattttttgttcgacccctggggccaggga

SEQ ID NO: 4482 - protein, 43 aa, Artificial Sequence
  Description of Artificial Sequence: Synthetic antibody
TISRDDSKNTLYLQMNSLKTEDTAVYYCTTEGSYFLFDPWGQG

SEQ ID NO: 4483 - DNA, 129 bp, Artificial Sequence
  Description of Artificial Sequence: Synthetic antibody
aacatctcaagagatgattcaaaaaacacgctgtatctgcaaatgaacagcctgaaaaccgatgacacagccgtgtattactgtaccacagaggggtcgtattttttgttcgacccctggggccaggga

SEQ ID NO: 4484 - protein, 43 aa, Artificial Sequence
  Description of Artificial Sequence: Synthetic antibody
NISRDDSKNTLYLQMNSLKTDDTAVYYCTTEGSYFLFDPWGQG

SEQ ID NO: 4485 - DNA, 129 bp, Artificial Sequence
  Description of Artificial Sequence: Synthetic antibody
ccatctcaagagatgattcaaaaaaacacgctgtatctgcaaatgaacagcctgaaaaccgaggacacagccgtgtattactgtaccacagaggggtcgtattttttgttcgacccctggggccaggga

SEQ ID NO: 4486 - protein, 43 aa, Artificial Sequence
  Description of Artificial Sequence: Synthetic antibody
PSQEMIQKNTLYLQMNSLKTEDTAVYYCTTEGSYFLFDPWGQG

SEQ ID NO: 4487 - protein, 15 aa, Artificial Sequence
  Description of Artificial Sequence: Synthetic antibody
CSHRRVGLATGFDIW

SEQ ID NO: 4488 - DNA, 129 bp, Artificial Sequence
  Description of Artificial Sequence: Synthetic antibody
actaaggactcctccaaaaacctggtggtcctcacaatgaccaacatggaccctgcggacacggccacatattactgttcacacagaagagttgggctggcgactggttttgatatctggggccaaggg

SEQ ID NO: 4489 - protein, 43 aa, Artificial Sequence
  Description of Artificial Sequence: Synthetic antibody
TKDSSKNLVVLTMTNMDPADTATYYCSHRRVGLATGFDIWGQG

SEQ ID NO: 4490 - DNA, 129 bp, Artificial Sequence
  Description of Artificial Sequence: Synthetic antibody
actaaggacacctccaaaaaccaggtggtcctcacaatgaccaacatggaccctgcggacacggccacatattactgttcacacagaagagttgggctggcgactggttttgatatctggggccaaggg

SEQ ID NO: 4491 - protein, 43 aa, Artificial Sequence
  Description of Artificial Sequence: Synthetic antibody
TKDTSKNQVVLTMTNMDPADTATYYCSHRRVGLATGFDIWGQG

SEQ ID NO: 4492 - DNA, 129 bp, Artificial Sequence
  Description of Artificial Sequence: Synthetic antibody
actaaggacaactccaaaaacctggtggtcctcacaatgaccaacatggaccctgcggacacggccacatattactgttcacacagaagagttgggctggcgactggttttgatatctggggccaaggg

SEQ ID NO: 4493 - protein, 43 aa, Artificial Sequence
  Description of Artificial Sequence: Synthetic antibody
TKDNSKNLVVLTMTNMDPADTATYYCSHRRVGLATGFDIWGQG

SEQ ID NO: 4494 - protein, 20 aa, Artificial Sequence
  Description of Artificial Sequence: Synthetic antibody
CAGTMVQGVPPARQNWFDPW

SEQ ID NO: 4495 - DNA, 129 bp, Artificial Sequence
  Description of Artificial Sequence: Synthetic antibody
tcgagcacagcctacatggagctgagcagcctgagatctgaggacacggccgtgtattactgtgcggggactatggttcagggagtcccccccgcgcgccaaaactggttcgacccctggggtcaggga

SEQ ID NO: 4496 - protein, 43 aa, Artificial Sequence
  Description of Artificial Sequence: Synthetic antibody
SSTAYMELSSLRSEDTAVYYCAGTMVQGVPPARQNWFDPWGQG

SEQ ID NO: 4497 - DNA, 129 bp, Artificial Sequence
  Description of Artificial Sequence: Synthetic antibody
acgagcacagcctacatggagctgagcagcctgagatctgaggacacggccgtgtattactgtgcggggactatggttcagggagtcccccccgcgcgccaaaactggttcgacccctggggtcaggga

SEQ ID NO: 4498 - protein, 43 aa, Artificial Sequence
  Description of Artificial Sequence: Synthetic antibody
TSTAYMELSSLRSEDTAVYYCAGTMVQGVPPARQNWFDPWGQG

SEQ ID NO: 4499 - DNA, 129 bp, Artificial Sequence
  Description of Artificial Sequence: Synthetic antibody
acgagcacagcctacatggagctgagcagcctgagatctgaggacacggccgtgtattactgtgcggggactatggttcagggagtcccccccgcgcgccaaaactggttcgacccctggggccaggga

SEQ ID NO: 4500 - protein, 13 aa, Artificial Sequence
  Description of Artificial Sequence: Synthetic antibody
CAKGRRGSYFDYW

SEQ ID NO: 4501 - DNA, 129 bp, Artificial Sequence
  Description of Artificial Sequence: Synthetic antibody
accatctccatatataattccaagaacacgctgtatctgcaaatgaacagcctgagagccgaggacacggccgtatattactgtgcgaaaggacgccgtgggagctactttgactactggggccaggga

SEQ ID NO: 4502 - protein, 43 aa, Artificial Sequence
  Description of Artificial Sequence: Synthetic antibody
TISIYNSKNTLYLQMNSLRAEDTAVYYCAKGRRGSYFDYWGQG

SEQ ID NO: 4503 - DNA, 129 bp, Artificial Sequence
  Description of Artificial Sequence: Synthetic antibody
accatctccatacataattccaagaacacgctgtatctgcaaatgaacagcctgagagccgaggacacggccgtatattactgtgcgaaaggacgccgtgggagctactttgactactggggccaggga

SEQ ID NO: 4504 - protein, 43 aa, Artificial Sequence
  Description of Artificial Sequence: Synthetic antibody
TISIHNSKNTLYLQMNSLRAEDTAVYYCAKGRRGSYFDYWGQG

SEQ ID NO: 4505 - DNA, 129 bp, Artificial Sequence
  Description of Artificial Sequence: Synthetic antibody
accatctccagagataattccaagaacacgctgtatctgcaaatgaacagcctgagagccgaggacacggccgtatattactgtgcgaaaggacgccgtgggagctactttgactactggggccaggga

SEQ ID NO: 4506 - protein, 43 aa, Artificial Sequence
  Description of Artificial Sequence: Synthetic antibody
TISRDNSKNTLYLQMNSLRAEDTAVYYCAKGRRGSYFDYWGQG

SEQ ID NO: 4507 - protein, 14 aa, Artificial Sequence
  Description of Artificial Sequence: Synthetic antibody
CAKFWFGELLPDYW

SEQ ID NO: 4508 - DNA, 129 bp, Artificial Sequence
  Description of Artificial Sequence: Synthetic antibody
atctccatatataattccaagaacacgctgtatctgcaaatgaacagcctgagagccgaggacacggccgtatattactgtgcgaaattctggttcggggagttattaccggactactggggccaggga

SEQ ID NO: 4509 - protein, 43 aa, Artificial Sequence
  Description of Artificial Sequence: Synthetic antibody
ISIYNSKNTLYLQMNSLRAEDTAVYYCAKFWFGELLPDYWGQG

SEQ ID NO: 4510 - DNA, 129 bp, Artificial Sequence
  Description of Artificial Sequence: Synthetic antibody
atctccagatataattccaagaacacgctgtatctgcaaatgaacagcctgagagccgaggacacggccgtatattactgtgcgaaattctggttcggggagttattaccggactactggggccaggga

SEQ ID NO: 4511 - protein, 43 aa, Artificial Sequence
  Description of Artificial Sequence: Synthetic antibody
ISRYNSKNTLYLQMNSLRAEDTAVYYCAKFWFGELLPDYWGQG

SEQ ID NO: 4512 - DNA, 129 bp, Artificial Sequence
  Description of Artificial Sequence: Synthetic antibody
atctccagagataattccaagaacacgctgtatctgcaaatgaacagcctgagagccgaggacacggccgtatattactgtgcgaaattctggttcggggagttattaccggactactggggccaggga

SEQ ID NO: 4513 - protein, 43 aa, Artificial Sequence
  Description of Artificial Sequence: Synthetic antibody
ISRDNSKNTLYLQMNSLRAEDTAVYYCAKFWFGELLPDYWGQG

SEQ ID NO: 4514 - protein, 16 aa, Artificial Sequence
  Description of Artificial Sequence: Synthetic antibody
CARDPGTNTWYGLDVW

SEQ ID NO: 4515 - DNA, 129 bp, Artificial Sequence
  Description of Artificial Sequence: Synthetic antibody
tgggacacctccacaagcactgcctacatggagctgagcagcctgagatctgacgacgcggccgtgtattactgtgcgagggatccgggcaccaacacctggtacggtctggacgtctggggccaaggg

SEQ ID NO: 4516 - protein, 43 aa, Artificial Sequence
  Description of Artificial Sequence: Synthetic antibody
WDTSTSTAYMELSSLRSDDAAVYYCARDPGTNTWYGLDVWGQG

SEQ ID NO: 4517 - DNA, 129 bp, Artificial Sequence
  Description of Artificial Sequence: Synthetic antibody
agggacacctccataagcacagcctacatggaactgagcagcctgagatctgacgacgcggccgtctattactgtgcgagggatccgggcaccaacacctggtacggtctggacgtctggggcgaaggg

SEQ ID NO: 4518 - protein, 43 aa, Artificial Sequence
  Description of Artificial Sequence: Synthetic antibody
RDTSISTAYMELSSLRSDDAAVYYCARDPGTNTWYGLDVWGEG

SEQ ID NO: 4519 - DNA, 129 bp, Artificial Sequence
  Description of Artificial Sequence: Synthetic antibody
agggacacctccacaagcacagcctacatggagctgagcagcctgagatctgacgacgcggccgtgtattactgtgcgagggatccgggcaccaacacctggtacggtctggacgtctggggccaaggg

SEQ ID NO: 4520 - protein, 43 aa, Artificial Sequence
  Description of Artificial Sequence: Synthetic antibody
RDTSTSTAYMELSSLRSDDAAVYYCARDPGTNTWYGLDVWGQG

SEQ ID NO: 4521 - protein, 14 aa, Artificial Sequence
  Description of Artificial Sequence: Synthetic antibody
CAKMSRALQIFDYW

SEQ ID NO: 4522 - DNA, 129 bp, Artificial Sequence
  Description of Artificial Sequence: Synthetic antibody
atctccatagataattccaagaatacgctgtatctgcaaatgaatagcctgagagccgaggacacggccgtatattattgtgcgaaaatgtcgagagcactccaaatttttgactactggggccaggga

SEQ ID NO: 4523 - protein, 43 aa, Artificial Sequence
  Description of Artificial Sequence: Synthetic antibody
ISIDNSKNTLYLQMNSLRAEDTAVYYCAKMSRALQIFDYWGQG

SEQ ID NO: 4524 - DNA, 129 bp, Artificial Sequence
  Description of Artificial Sequence: Synthetic antibody
atctccagatataattccaagaatacgctgtatctgcaaatgaatagcctgagagccgaggacacggccgtatattattgtgcgaaaatgtcgagagcactccaaatttttgactactggggccaggga

SEQ ID NO: 4525 - protein, 43 aa, Artificial Sequence
  Description of Artificial Sequence: Synthetic antibody
ISRYNSKNTLYLQMNSLRAEDTAVYYCAKMSRALQIFDYWGQG

SEQ ID NO: 4526 - DNA, 129 bp, Artificial Sequence
  Description of Artificial Sequence: Synthetic antibody
atctccagagataattccaagaatacgctgtatctgcaaatgaatagcctgagagccgaggacacggccgtatattattgtgcgaaaatgtcgagagcactccaaatttttgactactggggccaggga

SEQ ID NO: 4527 - protein, 43 aa, Artificial Sequence
  Description of Artificial Sequence: Synthetic antibody
ISRDNSKNTLYLQMNSLRAEDTAVYYCAKMSRALQIFDYWGQG

SEQ ID NO: 4528 - protein, 25 aa, Artificial Sequence
  Description of Artificial Sequence: Synthetic antibody
CARWDYYGSGSYFLPWPGDWYFDLW

SEQ ID NO: 4529 - DNA, 129 bp, Artificial Sequence
  Description of Artificial Sequence: Synthetic antibody
ctgcaaatgaacagcctgagagccgaggacacggccgtatattactgtgcgagatgggattactatggttcggggagttatttcctcccctggccaggggactggtacttcgatctctggggccgtggc

SEQ ID NO: 4530 - protein, 43 aa, Artificial Sequence
  Description of Artificial Sequence: Synthetic antibody
LQMNSLRAEDTAVYYCARWDYYGSGSYFLPWPGDWYFDLWGRG

SEQ ID NO: 4531 - DNA, 129 bp, Artificial Sequence
  Description of Artificial Sequence: Synthetic antibody
ctgaaaatgaactgcctgagagccgaggacacggccgtatattactgtgcgagatgggattactatggttcggggagttatttcctcccctggccaggggactggtacttcgatctctggggccgtggc

SEQ ID NO: 4532 - protein, 43 aa, Artificial Sequence
  Description of Artificial Sequence: Synthetic antibody
LKMNCLRAEDTAVYYCARWDYYGSGSYFLPWPGDWYFDLWGRG

SEQ ID NO: 4533 - DNA, 129 bp, Artificial Sequence
  Description of Artificial Sequence: Synthetic antibody
ctgaaaatgaaccgcctgagagccgaggacacggccgtatattactgtgcgagatgggattactatggttcggggagttatttcctcccctggccaggggactggtacttcgatctctggggccgtggc

SEQ ID NO: 4534 - protein, 43 aa, Artificial Sequence
  Description of Artificial Sequence: Synthetic antibody
LKMNRLRAEDTAVYYCARWDYYGSGSYFLPWPGDWYFDLWGRG

SEQ ID NO: 4535 - protein, 14 aa, Artificial Sequence
  Description of Artificial Sequence: Synthetic antibody
CARRSVGGRYFDYW

SEQ ID NO: 4536 - DNA, 129 bp, Artificial Sequence
  Description of Artificial Sequence: Synthetic antibody
atctccatatacaattccaagaacactctgtatctgcaaatgaacagcctgagagccgaggacacggccgtatattactgtgcgcggaggtcagtgggtggtcgttattttgactactggggccaggga

SEQ ID NO: 4537 - protein, 43 aa, Artificial Sequence
  Description of Artificial Sequence: Synthetic antibody
ISIYNSKNTLYLQMNSLRAEDTAVYYCARRSVGGRYFDYWGQG

SEQ ID NO: 4538 - DNA, 129 bp, Artificial Sequence
  Description of Artificial Sequence: Synthetic antibody
atctccatacacaattccaagaacactctgtatctgcaaatgaacagcctgagagccgaggacacggccgtatattactgtgcgcggaggtcagtgggtggtcgttattttgactactggggccaggga

SEQ ID NO: 4539 - protein, 43 aa, Artificial Sequence
  Description of Artificial Sequence: Synthetic antibody
ISIHNSKNTLYLQMNSLRAEDTAVYYCARRSVGGRYFDYWGQG

SEQ ID NO: 4540 - DNA, 129 bp, Artificial Sequence
  Description of Artificial Sequence: Synthetic antibody
atctccagagacaattccaagaacactctgtatctgcaaatgaacagcctgagagccgaggacacggccgtatattactgtgcgcggaggtcagtgggtggtcgttattttgactactggggccaggga

SEQ ID NO: 4541 - protein, 43 aa, Artificial Sequence
  Description of Artificial Sequence: Synthetic antibody
ISRDNSKNTLYLQMNSLRAEDTAVYYCARRSVGGRYFDYWGQG

SEQ ID NO: 4542 - protein, 21 aa, Artificial Sequence
  Description of Artificial Sequence: Synthetic antibody
CARARGITMIVGGREDAFDIW

SEQ ID NO: 4543 - DNA, 129 bp, Artificial Sequence
  Description of Artificial Sequence: Synthetic antibody
agcactgcctacatggagctgtggagcctgagatctgacgacacggccgtgtattactgtgcgagagcgaggggtattactatgatagtagggggcagagaggatgcttttgatatctggggccaaggg

SEQ ID NO: 4544 - protein, 43 aa, Artificial Sequence
  Description of Artificial Sequence: Synthetic antibody
STAYMELWSLRSDDTAVYYCARARGITMIVGGREDAFDIWGQG

SEQ ID NO: 4545 - DNA, 129 bp, Artificial Sequence
  Description of Artificial Sequence: Synthetic antibody
agcactgcctacatggagctgaggagcctgagatctgacgacacggccgtgtattactgtgcgagagcgaggggtattactatgatagtagggggcagagaggatgcttttgatatctggggccaaggg

SEQ ID NO: 4546 - protein, 43 aa, Artificial Sequence
  Description of Artificial Sequence: Synthetic antibody
STAYMELRSLRSDDTAVYYCARARGITMIVGGREDAFDIWGQG

SEQ ID NO: 4547 - DNA, 129 bp, Artificial Sequence
  Description of Artificial Sequence: Synthetic antibody
agcacagcctacatggagctgaggagcctgagatctgacgacacggccgtgtattactgtgcgagagcgaggggtattactatgatagtagggggcagagaggatgcttttgatatctggggccaaggg

SEQ ID NO: 4548 - protein, 16 aa, Artificial Sequence
  Description of Artificial Sequence: Synthetic antibody
CARGKVWEGGYGWGYW

SEQ ID NO: 4549 - DNA, 129 bp, Artificial Sequence
  Description of Artificial Sequence: Synthetic antibody
tgggacaacgccaagaactcactgtttctgcaaatgaacagcctgagagccgaggacacggccgtgtattactgtgcgagagggaaggtttgggagggtggctacggctggggttactggggccaggga

SEQ ID NO: 4550 - protein, 43 aa, Artificial Sequence
  Description of Artificial Sequence: Synthetic antibody
WDNAKNSLFLQMNSLRAEDTAVYYCARGKVWEGGYGWGYWGQG

SEQ ID NO: 4551 - DNA, 129 bp, Artificial Sequence
  Description of Artificial Sequence: Synthetic antibody
agggacaacgccaagaactcactgtttctgcaaatgaacagcctgagagccgaggacacggccgtgtattactgtgcgagagggaaggtttgggagggtggctacggctggggttactggggccaggga

SEQ ID NO: 4552 - protein, 43 aa, Artificial Sequence
  Description of Artificial Sequence: Synthetic antibody
RDNAKNSLFLQMNSLRAEDTAVYYCARGKVWEGGYGWGYWGQG

SEQ ID NO: 4553 - DNA, 129 bp, Artificial Sequence
  Description of Artificial Sequence: Synthetic antibody
agggacaacgccaagaactcactgtttctgcaaatgaacagcctgagagccgaggacacggcagtgtattactgtgcgagagggaaggtttgggagggtggctacggctggggttactggggccaggga

SEQ ID NO: 4554 - protein, 20 aa, Artificial Sequence
  Description of Artificial Sequence: Synthetic antibody
CARGLFYYGSVVAKIPGGYW

SEQ ID NO: 4555 - DNA, 129 bp, Artificial Sequence
  Description of Artificial Sequence: Synthetic antibody
ataagcacagcctacatggagctgagcagcctgagatctgaggacacggccgtgtattactgtgcgagaggcctcttctactatggttcagtcgtcgccaaaattccgggggggtactggggccaggga

SEQ ID NO: 4556 - protein, 43 aa, Artificial Sequence
  Description of Artificial Sequence: Synthetic antibody
ISTAYMELSSLRSEDTAVYYCARGLFYYGSVVAKIPGGYWGQG

SEQ ID NO: 4557 - DNA, 129 bp, Artificial Sequence
  Description of Artificial Sequence: Synthetic antibody
ataagcacaccctacatggagctgagcagcctgagatctgaggacacggccgtgtattactgtgcgagaggcctcttctactatggttcagtcgtcgccaaaattccgggggggtactggggccaggga

SEQ ID NO: 4558 - protein, 43 aa, Artificial Sequence
  Description of Artificial Sequence: Synthetic antibody
ISTPYMELSSLRSEDTAVYYCARGLFYYGSVVAKIPGGYWGQG

SEQ ID NO: 4559 - DNA, 129 bp, Artificial Sequence
  Description of Artificial Sequence: Synthetic antibody
ataaccacagcctacatggagctgagcagcctgagatctgaggacacggccgtgtattactgtgcgagaggcctcttctactatggttcagtcgtcgccaaaattccgggggggtactggggccaggga

SEQ ID NO: 4560 - protein, 43 aa, Artificial Sequence
  Description of Artificial Sequence: Synthetic antibody
ITTAYMELSSLRSEDTAVYYCARGLFYYGSVVAKIPGGYWGQG

SEQ ID NO: 4561 - protein, 22 aa, Artificial Sequence
  Description of Artificial Sequence: Synthetic antibody
CARDKFSSGSYYYYYYYGMDVW

SEQ ID NO: 4562 - DNA, 129 bp, Artificial Sequence
  Description of Artificial Sequence: Synthetic antibody
tcgatgtatcttcaaatgaacagcctgagagccgaggacacggccgtgtattactgtgcgagagataaattttccagtgggagctactattactactactactacggtatggacgtctggggccaaggg

SEQ ID NO: 4563 - protein, 43 aa, Artificial Sequence
  Description of Artificial Sequence: Synthetic antibody
SMYLQMNSLRAEDTAVYYCARDKFSSGSYYYYYYYGMDVWGQG

SEQ ID NO: 4564 - DNA, 129 bp, Artificial Sequence
  Description of Artificial Sequence: Synthetic antibody
acgctgtatcttcaaatgaacagcctgagagccgaggacacggccgtgtattactgtgcgagagataaattttccagtgggagctactattactactactactacggtatggacgtctggggccaaggg

SEQ ID NO: 4565 - protein, 43 aa, Artificial Sequence
  Description of Artificial Sequence: Synthetic antibody
TLYLQMNSLRAEDTAVYYCARDKFSSGSYYYYYYYGMDVWGQG

SEQ ID NO: 4566 - DNA, 129 bp, Artificial Sequence
  Description of Artificial Sequence: Synthetic antibody
acgatgtatcttcaaatgaacagcctgagagccgagtacacggccgtgtattactgtgcgagagataaattttccagtgggagctactattactactactactacggtatggacgtctggggccaaggg

SEQ ID NO: 4567 - protein, 43 aa, Artificial Sequence
  Description of Artificial Sequence: Synthetic antibody
TMYLQMNSLRAEYTAVYYCARDKFSSGSYYYYYYYGMDVWGQG

SEQ ID NO: 4568 - protein, 26 aa, Artificial Sequence
  Description of Artificial Sequence: Synthetic antibody
CAKDRAYYDILTGYYGTYDQDAFDIW

SEQ ID NO: 4569 - DNA, 129 bp, Artificial Sequence
  Description of Artificial Sequence: Synthetic antibody
caattgaactgcctgagagccgaggacacggccgtatattactgtgcgaaagatcgggcgtattacgatattttgactggttattatgggacttatgatcaagatgcttttgatatctggggccaaggg

SEQ ID NO: 4570 - protein, 43 aa, Artificial Sequence
  Description of Artificial Sequence: Synthetic antibody
QLNCLRAEDTAVYYCAKDRAYYDILTGYYGTYDQDAFDIWGQG

SEQ ID NO: 4571 - DNA, 129 bp, Artificial Sequence
  Description of Artificial Sequence: Synthetic antibody
caaatgaactgcctgagagccgaggacacggccgtatattactgtgcgaaagatcgggcgtattacgatattttgactggttattatgggacttatgatcaagatgcttttgatatctggggccaaggg

SEQ ID NO: 4572 - protein, 43 aa, Artificial Sequence
  Description of Artificial Sequence: Synthetic antibody
QMNCLRAEDTAVYYCAKDRAYYDILTGYYGTYDQDAFDIWGQG

SEQ ID NO: 4573 - DNA, 129 bp, Artificial Sequence
  Description of Artificial Sequence: Synthetic antibody
caaatgaacagcctgagagccgaggacacggccgtatattactgtgcgaaagatcgggcgtattacgatattttgactggttattatgggacttatgatcaagatgcttttgatatctggggccaaggg

SEQ ID NO: 4574 - protein, 43 aa, Artificial Sequence
  Description of Artificial Sequence: Synthetic antibody
QMNSLRAEDTAVYYCAKDRAYYDILTGYYGTYDQDAFDIWGQG

SEQ ID NO: 4575 - protein, 11 aa, Artificial Sequence
  Description of Artificial Sequence: Synthetic antibody
CARGMSLLDYW

SEQ ID NO: 4576 - DNA, 129 bp, Artificial Sequence
  Description of Artificial Sequence: Synthetic antibody
cgattcaccatctccagggacaacgccaagaactcactgcttctgcacatgaacagcctgagagccgaggacgcggccgtgtattactgtgcgagagggatgagccttcttgactactggggccaggga

SEQ ID NO: 4577 - protein, 43 aa, Artificial Sequence
  Description of Artificial Sequence: Synthetic antibody
RFTISRDNAKNSLLLHMNSLRAEDAAVYYCARGMSLLDYWGQG

SEQ ID NO: 4578 - DNA, 129 bp, Artificial Sequence
  Description of Artificial Sequence: Synthetic antibody
cgattcaccacctccagggacaacgccaagaactcactgcttctgcacatgaacagcctgagagccgaggacgcggccgtgtattactgtgcgagagggatgagccttcttgactactggggccaggga

SEQ ID NO: 4579 - protein, 43 aa, Artificial Sequence
  Description of Artificial Sequence: Synthetic antibody
RFTTSRDNAKNSLLLHMNSLRAEDAAVYYCARGMSLLDYWGQG

SEQ ID NO: 4580 - DNA, 129 bp, Artificial Sequence
  Description of Artificial Sequence: Synthetic antibody
cgattcaccacctccagggacaacgccaagaactcactgcttctgcacatgaacagcctgagagccgaggacgcggccgtgtattactgtgcgagagggatgagcctccttgactactggggccaggga

SEQ ID NO: 4581 - protein, 18 aa, Artificial Sequence
  Description of Artificial Sequence: Synthetic antibody
CARGGRGRPGYSRWGDYW

SEQ ID NO: 4582 - DNA, 129 bp, Artificial Sequence
  Description of Artificial Sequence: Synthetic antibody
tacgccaagaactccctgtatctgcaaatgaacagtctgagagctgaggacacggccttgtattactgtgcaagaggagggcgtgggcgccccgggtatagcagatggggggactactggggccaggga

SEQ ID NO: 4583 - protein, 43 aa, Artificial Sequence
  Description of Artificial Sequence: Synthetic antibody
YAKNSLYLQMNSLRAEDTALYYCARGGRGRPGYSRWGDYWGQG

SEQ ID NO: 4584 - DNA, 129 bp, Artificial Sequence
  Description of Artificial Sequence: Synthetic antibody
aacgccaagaactccctgtatctgcaaatgaacagtctgagagctgaggacacggccttgtattactgtgcaagaggaggtcgtgggcgccccgggtatagcagatggggggactactggggccaggga

SEQ ID NO: 4585 - protein, 43 aa, Artificial Sequence
  Description of Artificial Sequence: Synthetic antibody
NAKNSLYLQMNSLRAEDTALYYCARGGRGRPGYSRWGDYWGQG

SEQ ID NO: 4586 - DNA, 129 bp, Artificial Sequence
  Description of Artificial Sequence: Synthetic antibody
caacgccaagaactcctgtatctgcaaatgaacagtctgagagctgaggacacggccttgtattactgtgcaagaggaggtcgtgggcgccccgggtatagcagatggggggactactggggccaggga

SEQ ID NO: 4587 - protein, 43 aa, Artificial Sequence
  Description of Artificial Sequence: Synthetic antibody
QRQELLYLQMNSLRAEDTALYYCARGGRGRPGYSRWGDYWGQG

SEQ ID NO: 4588 - protein, 16 aa, Artificial Sequence
  Description of Artificial Sequence: Synthetic antibody
CARDPNGSGSYYLGYW

SEQ ID NO: 4589 - DNA, 129 bp, Artificial Sequence
  Description of Artificial Sequence: Synthetic antibody
tgggacacgtccacgagcactgtctacatggagctgagcagcctgagatctgaggacacggccgtgtattactgtgcgagagatcccaatggttcggggagttactatttaggctactggggccaggga

SEQ ID NO: 4590 - protein, 43 aa, Artificial Sequence
  Description of Artificial Sequence: Synthetic antibody
WDTSTSTVYMELSSLRSEDTAVYYCARDPNGSGSYYLGYWGQG

SEQ ID NO: 4591 - DNA, 129 bp, Artificial Sequence
  Description of Artificial Sequence: Synthetic antibody
tgggacacgcccacgagcacagtctacatggagctgagcagcctgagatctgaggacacggccgtgtattactgtgcgagagatcccaatggttcggggagttactatttaggctactggggccaggga

SEQ ID NO: 4592 - protein, 43 aa, Artificial Sequence
  Description of Artificial Sequence: Synthetic antibody
WDTPTSTVYMELSSLRSEDTAVYYCARDPNGSGSYYLGYWGQG

SEQ ID NO: 4593 - DNA, 129 bp, Artificial Sequence
  Description of Artificial Sequence: Synthetic antibody
agggacacgtccacgagcacagtctacatggagctgagcagcctgagatctgaggacacggccgtgtattactgtgcgagagatcccaatggttcggggagttactatttaggctactggggccaggga

SEQ ID NO: 4594 - protein, 43 aa, Artificial Sequence
  Description of Artificial Sequence: Synthetic antibody
RDTSTSTVYMELSSLRSEDTAVYYCARDPNGSGSYYLGYWGQG

SEQ ID NO: 4595 - protein, 21 aa, Artificial Sequence
  Description of Artificial Sequence: Synthetic antibody
CARGPSIAAHPLYYYYGMDVW

SEQ ID NO: 4596 - DNA, 129 bp, Artificial Sequence
  Description of Artificial Sequence: Synthetic antibody
tacacgatgtatcttcaaatgaacagcctgagagccgaggacacggccgtgtattactgtgcgagagggccgagtatagcagctcaccccctctactactactacggtatggacgtctggggccaaggg

SEQ ID NO: 4597 - protein, 43 aa, Artificial Sequence
  Description of Artificial Sequence: Synthetic antibody
YTMYLQMNSLRAEDTAVYYCARGPSIAAHPLYYYYGMDVWGQG

SEQ ID NO: 4598 - DNA, 129 bp, Artificial Sequence
  Description of Artificial Sequence: Synthetic antibody
aacacgctgtatcttcaaatgaacagcctgagagccgaggacacggccgtgtattactgtgcgagagggccgagtatagcagctcaccccctctactactactacggtatggacgtctggggccaaggg

SEQ ID NO: 4599 - protein, 43 aa, Artificial Sequence
  Description of Artificial Sequence: Synthetic antibody
NTLYLQMNSLRAEDTAVYYCARGPSIAAHPLYYYYGMDVWGQG

SEQ ID NO: 4600 - DNA, 129 bp, Artificial Sequence
  Description of Artificial Sequence: Synthetic antibody
aacacgctgtatcttcaaatcaacagcctgagagccgaggacacggccgtgtattactgtgcgagagggccgagtatagcagctcaccccctctactactactacggtatggacgtctggggccaaggg

SEQ ID NO: 4601 - protein, 43 aa, Artificial Sequence
  Description of Artificial Sequence: Synthetic antibody
NTLYLQINSLRAEDTAVYYCARGPSIAAHPLYYYYGMDVWGQG

SEQ ID NO: 4602 - protein, 15 aa, Artificial Sequence
  Description of Artificial Sequence: Synthetic antibody
CTTPYGSGSYSRDYW

SEQ ID NO: 4603 - DNA, 129 bp, Artificial Sequence
  Description of Artificial Sequence: Synthetic antibody
caagagatgattcaaaaaaacacgctgtatctgcaaatgaacagcctgaaaaccgaggacacagccgtgtattactgtaccacaccttatggttcggggagttattccagagactactggggccaggga

SEQ ID NO: 4604 - protein, 43 aa, Artificial Sequence
  Description of Artificial Sequence: Synthetic antibody
QEMIQKNTLYLQMNSLKTEDTAVYYCTTPYGSGSYSRDYWGQG

SEQ ID NO: 4605 - DNA, 129 bp, Artificial Sequence
  Description of Artificial Sequence: Synthetic antibody
tcaagagatgattcaaaaaacacgctgtatctgcaaatgaacagcctgaaaaccgagggcacagccgtgtattactgtaccacaccttatggttcggggagttattccagagactactggggccaggga

SEQ ID NO: 4606 - protein, 43 aa, Artificial Sequence
  Description of Artificial Sequence: Synthetic antibody
SRDDSKNTLYLQMNSLKTEGTAVYYCTTPYGSGSYSRDYWGQG

SEQ ID NO: 4607 - DNA, 129 bp, Artificial Sequence
  Description of Artificial Sequence: Synthetic antibody
tcaagagatgattcaaaaaacacgctgtatctgcaaatgaacagcctgaaaaccgaggacacagccgtgtattactgtaccacaccttatggttcggggagttattccagagactactggggccaggga

SEQ ID NO: 4608 - protein, 43 aa, Artificial Sequence
  Description of Artificial Sequence: Synthetic antibody
SRDDSKNTLYLQMNSLKTEDTAVYYCTTPYGSGSYSRDYWGQG

SEQ ID NO: 4609 - protein, 14 aa, Artificial Sequence
  Description of Artificial Sequence: Synthetic antibody
CARVKGWTGYFDYW

SEQ ID NO: 4610 - DNA, 129 bp, Artificial Sequence
  Description of Artificial Sequence: Synthetic antibody
atctccagggacaacgccaagaactcactgtatctgcaaatgaacagcctgagagccgaggacacggccgtgtattactgtgcgagagttaagggctggacgggttactttgactactggggccaggga

SEQ ID NO: 4611 - protein, 43 aa, Artificial Sequence
  Description of Artificial Sequence: Synthetic antibody
ISRDNAKNSLYLQMNSLRAEDTAVYYCARVKGWTGYFDYWGQG

SEQ ID NO: 4612 - DNA, 129 bp, Artificial Sequence
  Description of Artificial Sequence: Synthetic antibody
atctccaggcacaacgccaacaactcactgtatctgcaaatgaacagcctgagagccgaggacacggccgtgtattactgtgcgagagttaagggctggacgggttactttgactactggggccaggga

SEQ ID NO: 4613 - protein, 43 aa, Artificial Sequence
  Description of Artificial Sequence: Synthetic antibody
ISRHNANNSLYLQMNSLRAEDTAVYYCARVKGWTGYFDYWGQG

SEQ ID NO: 4614 - DNA, 129 bp, Artificial Sequence
  Description of Artificial Sequence: Synthetic antibody
atctccaggcacaaccccaagaactcactgtatctgcaaatgaacagcctgagagccgaggacacggccgtgtattactgtgcgagagttaagggctggacgggttactttgactactggggccaggga

SEQ ID NO: 4615 - protein, 43 aa, Artificial Sequence
  Description of Artificial Sequence: Synthetic antibody
ISRHNPKNSLYLQMNSLRAEDTAVYYCARVKGWTGYFDYWGQG

SEQ ID NO: 4616 - protein, 17 aa, Artificial Sequence
  Description of Artificial Sequence: Synthetic antibody
CTSSRSIARGGGAFDIW

SEQ ID NO: 4617 - DNA, 129 bp, Artificial Sequence
  Description of Artificial Sequence: Synthetic antibody
tattattcaaagaacacggcgtatctgcaaatgaacagcctgaaaaccgaggacacggccgtgtattactgtactagcagtcgaagtatagcaagagggggtggtgcttttgatatctggggccaaggg

SEQ ID NO: 4618 - protein, 43 aa, Artificial Sequence
  Description of Artificial Sequence: Synthetic antibody
YYSKNTAYLQMNSLKTEDTAVYYCTSSRSIARGGGAFDIWGQG

SEQ ID NO: 4619 - DNA, 129 bp, Artificial Sequence
  Description of Artificial Sequence: Synthetic antibody
gatgattcaaagaacacggcgtatctgcaaatgaacagcctgaaaaccgaggacacggccgtgtattactgtactagcagtcgaagtatagcaagagggggtggtgcttttgatatctggggccaaggg

SEQ ID NO: 4620 - protein, 43 aa, Artificial Sequence
  Description of Artificial Sequence: Synthetic antibody
DDSKNTAYLQMNSLKTEDTAVYYCTSSRSIARGGGAFDIWGQG

SEQ ID NO: 4621 - DNA, 129 bp, Artificial Sequence
  Description of Artificial Sequence: Synthetic antibody
cattattcaaagaacacggcgtatctgcaaatgaacagcctgaaaaccgaggacacggccgtgtattactgtactagcagtcgaagtatagcaagagggggtggtgcttttgatatctggggccaaggg

SEQ ID NO: 4622 - protein, 43 aa, Artificial Sequence
  Description of Artificial Sequence: Synthetic antibody
HYSKNTAYLQMNSLKTEDTAVYYCTSSRSIARGGGAFDIWGQG

SEQ ID NO: 4623 - protein, 14 aa, Artificial Sequence
  Description of Artificial Sequence: Synthetic antibody
CARDKGWGDGMDVW

SEQ ID NO: 4624 - DNA, 129 bp, Artificial Sequence
  Description of Artificial Sequence: Synthetic antibody
atctccatatacaattccaagaacacgctgtatcttcaaatgggcagcctgagagctgaggacatggctgcgtattactgtgcgagagataaagggtggggggacggaatggacgtctggggccaaggg

SEQ ID NO: 4625 - protein, 43 aa, Artificial Sequence
  Description of Artificial Sequence: Synthetic antibody
ISIYNSKNTLYLQMGSLRAEDMAAYYCARDKGWGDGMDVWGQG

SEQ ID NO: 4626 - DNA, 129 bp, Artificial Sequence
  Description of Artificial Sequence: Synthetic antibody
atctccatacacaattccaagaacacgctgtatcttcaaatgggcagcctgagagctgaggacatggctgcgtattactgtgcgagagataaagggtggggggacggaatggacgtctggggccaaggg

SEQ ID NO: 4627 - protein, 43 aa, Artificial Sequence
  Description of Artificial Sequence: Synthetic antibody
ISIHNSKNTLYLQMGSLRAEDMAAYYCARDKGWGDGMDVWGQG

SEQ ID NO: 4628 - DNA, 129 bp, Artificial Sequence
  Description of Artificial Sequence: Synthetic antibody
atctccagagacaattccaagaacacgctgtatcttcaaatgggcagcctgagagctgaggacatggctgcgtattactgtgcgagagataaagggtggggggacggaatggacgtctggggccaaggg

SEQ ID NO: 4629 - protein, 43 aa, Artificial Sequence
  Description of Artificial Sequence: Synthetic antibody
ISRDNSKNTLYLQMGSLRAEDMAAYYCARDKGWGDGMDVWGQG

SEQ ID NO: 4630 - protein, 16 aa, Artificial Sequence
  Description of Artificial Sequence: Synthetic antibody
CAKSSPTVTNNWFDPW

SEQ ID NO: 4631 - DNA, 129 bp, Artificial Sequence
  Description of Artificial Sequence: Synthetic antibody
agagacaattccaagaacacactgtatctgcaaatgaacggcctgagagccggggacacggccatatattactgtgcgaaatcaagtccaacggtgactaacaactggttcgacccctggggccaggga

SEQ ID NO: 4632 - protein, 43 aa, Artificial Sequence
  Description of Artificial Sequence: Synthetic antibody
RDNSKNTLYLQMNGLRAGDTAIYYCAKSSPTVTNNWFDPWGQG

SEQ ID NO: 4633 - DNA, 129 bp, Artificial Sequence
  Description of Artificial Sequence: Synthetic antibody
agagacaattccaagaacacactgtatctgcaaatgaacagcctgagagccggggacacggccatatattactgtgcgaaatcaagtccaacggtgactaacaactggttcgacccctggggccaggga

SEQ ID NO: 4634 - protein, 43 aa, Artificial Sequence
  Description of Artificial Sequence: Synthetic antibody
RDNSKNTLYLQMNSLRAGDTAIYYCAKSSPTVTNNWFDPWGQG

SEQ ID NO: 4635 - DNA, 129 bp, Artificial Sequence
  Description of Artificial Sequence: Synthetic antibody
agagacaattccaagaacacactgtatctgcaaatgaacagcctgagagccgaggacacggccatatattactgtgcgaaatcaagtccaacggtgactaacaactggttcgacccctggggccaggga

SEQ ID NO: 4636 - protein, 43 aa, Artificial Sequence
  Description of Artificial Sequence: Synthetic antibody
RDNSKNTLYLQMNSLRAEDTAIYYCAKSSPTVTNNWFDPWGQG

SEQ ID NO: 4637 - protein, 16 aa, Artificial Sequence
  Description of Artificial Sequence: Synthetic antibody
CAKDYGSSWFYYFDYW

SEQ ID NO: 4638 - DNA, 129 bp, Artificial Sequence
  Description of Artificial Sequence: Synthetic antibody
atatataattccaacaacacgctgtatctgcaaatgaaccgcctgagagccgaggacacggccgtatattactgtgcgaaagattacggcagcagctggttctactactttgactactggggccaggga

SEQ ID NO: 4639 - protein, 43 aa, Artificial Sequence
  Description of Artificial Sequence: Synthetic antibody
IYNSNNTLYLQMNRLRAEDTAVYYCAKDYGSSWFYYFDYWGQG

SEQ ID NO: 4640 - DNA, 129 bp, Artificial Sequence
  Description of Artificial Sequence: Synthetic antibody
agagataattccaagaacacgctgtatctgcaaatgaacagcctgagagccgaggacacggccgtatattactgtgcgaaagattacggcagcagctggttctactactttgactactggggccaggga

SEQ ID NO: 4641 - protein, 43 aa, Artificial Sequence
  Description of Artificial Sequence: Synthetic antibody
RDNSKNTLYLQMNSLRAEDTAVYYCAKDYGSSWFYYFDYWGQG

SEQ ID NO: 4642 - DNA, 129 bp, Artificial Sequence
  Description of Artificial Sequence: Synthetic antibody
agagataattccaagaacacgctgtatctgcaaatgaacagcctgagagccgaggacacggccatatattactgtgcgaaagattacggcagcagctggttctactactttgactactggggccaggga

SEQ ID NO: 4643 - protein, 43 aa, Artificial Sequence
  Description of Artificial Sequence: Synthetic antibody
RDNSKNTLYLQMNSLRAEDTAIYYCAKDYGSSWFYYFDYWGQG

SEQ ID NO: 4644 - protein, 13 aa, Artificial Sequence
  Description of Artificial Sequence: Synthetic antibody
CANGIAARGTDYW

SEQ ID NO: 4645 - DNA, 129 bp, Artificial Sequence
  Description of Artificial Sequence: Synthetic antibody
accatctccatatataattccaagaacacgctgtatctgcaaatgagcagcctgagagccgaggacacggccgtatattactgtgcgaatggaatagcagcacgtggtaccgactactggggccaggga

SEQ ID NO: 4646 - protein, 43 aa, Artificial Sequence
  Description of Artificial Sequence: Synthetic antibody
TISIYNSKNTLYLQMSSLRAEDTAVYYCANGIAARGTDYWGQG

SEQ ID NO: 4647 - DNA, 129 bp, Artificial Sequence
  Description of Artificial Sequence: Synthetic antibody
accatctccatacataattccaagaacacgctgtatctgcaaatgagcagcctgagagccgaggacacggccgtatattactgtgcgaatggaatagcagcacgtggtaccgactactggggccaggga

SEQ ID NO: 4648 - protein, 43 aa, Artificial Sequence
  Description of Artificial Sequence: Synthetic antibody
TISIHNSKNTLYLQMSSLRAEDTAVYYCANGIAARGTDYWGQG

SEQ ID NO: 4649 - DNA, 129 bp, Artificial Sequence
  Description of Artificial Sequence: Synthetic antibody
accatctccagagataattccaagaacacgctgtatctgcaaatgagcagcctgagagccgaggacacggccgtatattactgtgcgaatggaatagcagcacgtggtaccgactactggggccaggga

SEQ ID NO: 4650 - protein, 43 aa, Artificial Sequence
  Description of Artificial Sequence: Synthetic antibody
TISRDNSKNTLYLQMSSLRAEDTAVYYCANGIAARGTDYWGQG

SEQ ID NO: 4651 - protein, 17 aa, Artificial Sequence
  Description of Artificial Sequence: Synthetic antibody
CAKDEDSGSGVGGMDVW

SEQ ID NO: 4652 - DNA, 129 bp, Artificial Sequence
  Description of Artificial Sequence: Synthetic antibody
gacaattccaagaacacgctgtatctgcaaatgaacagcctgagagccgaggacacggctgtgtattactgtgcgaaagacgaagattcggggagtggagtggggggtatggacgtctggggccaaggg

SEQ ID NO: 4653 - protein, 43 aa, Artificial Sequence
  Description of Artificial Sequence: Synthetic antibody
DNSKNTLYLQMNSLRAEDTAVYYCAKDEDSGSGVGGMDVWGQG

SEQ ID NO: 4654 - DNA, 129 bp, Artificial Sequence
  Description of Artificial Sequence: Synthetic antibody
gacaattccaacaacacgctgtatctgcaaatgaacagcctgagagccgaggacacggctgtgtattactgtgcgaaagacgaagattcggggagtggagtggggggtatggacgtctggggccaaggg

SEQ ID NO: 4655 - protein, 43 aa, Artificial Sequence
  Description of Artificial Sequence: Synthetic antibody
DNSNNTLYLQMNSLRAEDTAVYYCAKDEDSGSGVGGMDVWGQG

SEQ ID NO: 4656 - DNA, 129 bp, Artificial Sequence
  Description of Artificial Sequence: Synthetic antibody
cacaattccaagaacacgctgtatctgcaaatgaacagcctgagagccgaggacacggctgtgtattactgtgcgaaagacgaagattcggggagtggagtggggggtatggacgtctggggccaaggg

SEQ ID NO: 4657 - protein, 43 aa, Artificial Sequence
  Description of Artificial Sequence: Synthetic antibody
HNSKNTLYLQMNSLRAEDTAVYYCAKDEDSGSGVGGMDVWGQG

SEQ ID NO: 4658 - protein, 19 aa, Artificial Sequence
  Description of Artificial Sequence: Synthetic antibody
CAKDRRGVRGVIPSYFDYW

SEQ ID NO: 4659 - DNA, 129 bp, Artificial Sequence
  Description of Artificial Sequence: Synthetic antibody
gccaagaactccctgtatctgcaaatgaacagtctgagagctgaggacacggccttgtattactgtgcaaaagatagacgaggggttcggggagttattcctagttactttgactactggggccagggg

SEQ ID NO: 4660 - protein, 43 aa, Artificial Sequence
  Description of Artificial Sequence: Synthetic antibody
AKNSLYLQMNSLRAEDTALYYCAKDRRGVRGVIPSYFDYWGQG

SEQ ID NO: 4661 - DNA, 129 bp, Artificial Sequence
  Description of Artificial Sequence: Synthetic antibody
gccaagaactccctgtatctgcaaatgaacagtctgagagctgaggacacggccttgtattactgtgcaaaagatagacgaggggttcggggagttattcctagttactttgactactggggccaggga

SEQ ID NO: 4662 - DNA, 129 bp, Artificial Sequence
  Description of Artificial Sequence: Synthetic antibody
gccaagaactccctgtatctgaaaatgaacagtctgagagctgaggacacggccttttattactgtgcaaaagatagacgaggggttcggggagttattcctagttactttgactactggggccaggga

SEQ ID NO: 4663 - protein, 43 aa, Artificial Sequence
  Description of Artificial Sequence: Synthetic antibody
AKNSLYLKMNSLRAEDTAFYYCAKDRRGVRGVIPSYFDYWGQG

SEQ ID NO: 4664 - protein, 21 aa, Artificial Sequence
  Description of Artificial Sequence: Synthetic antibody
CARAGVWVRGVMPRQRELDYW

SEQ ID NO: 4665 - DNA, 129 bp, Artificial Sequence
  Description of Artificial Sequence: Synthetic antibody
tgcacagtctacttggagctgagcagcctgagatctgaggacacggccgtgtattactgtgcgagagcgggggtttgggttcggggagttatgccccgccagagagaacttgactactggggccaggga

SEQ ID NO: 4666 - protein, 43 aa, Artificial Sequence
  Description of Artificial Sequence: Synthetic antibody
CTVYLELSSLRSEDTAVYYCARAGVWVRGVMPRQRELDYWGQG

SEQ ID NO: 4667 - DNA, 129 bp, Artificial Sequence
  Description of Artificial Sequence: Synthetic antibody
tgcacagtctacatggagctgagcagcctgagatctgaggacacggccgtgtattactgtgcgagagcgggggtttgggttcggggagttatgccccgccagagagaacttgactactggggccaggga

SEQ ID NO: 4668 - protein, 43 aa, Artificial Sequence
  Description of Artificial Sequence: Synthetic antibody
CTVYMELSSLRSEDTAVYYCARAGVWVRGVMPRQRELDYWGQG

SEQ ID NO: 4669 - DNA, 129 bp, Artificial Sequence
  Description of Artificial Sequence: Synthetic antibody
agcacagtctacatggagctgagcagcctgagatctgaggacacggccgtgtattactgtgcgagagcgggggtttgggttcggggagttatgccccgccagagagaacttgactactggggccaggga

SEQ ID NO: 4670 - protein, 43 aa, Artificial Sequence
  Description of Artificial Sequence: Synthetic antibody
STVYMELSSLRSEDTAVYYCARAGVWVRGVMPRQRELDYWGQG

SEQ ID NO: 4671 - protein, 11 aa, Artificial Sequence
  Description of Artificial Sequence: Synthetic antibody
CATYSGSSHYW

SEQ ID NO: 4672 - DNA, 129 bp, Artificial Sequence
  Description of Artificial Sequence: Synthetic antibody
cggttcaccatctccagatataattccaagaacacgctgtatctgcaaatgaagagcctgagagccgaggacacggccgtatattactgtgcgacatatagtgggagctctcactactggggccaggga

SEQ ID NO: 4673 - protein, 43 aa, Artificial Sequence
  Description of Artificial Sequence: Synthetic antibody
RFTISRYNSKNTLYLQMKSLRAEDTAVYYCATYSGSSHYWGQG

SEQ ID NO: 4674 - DNA, 129 bp, Artificial Sequence
  Description of Artificial Sequence: Synthetic antibody
cggttcaccatctccagagataattccaagaacacgctgtatctgcaaatgaagagcctgagagccgaggacacggccgtatattactgtgcgacatatagtgggagctctcactactggggccaggga

SEQ ID NO: 4675 - protein, 43 aa, Artificial Sequence
  Description of Artificial Sequence: Synthetic antibody
RFTISRDNSKNTLYLQMKSLRAEDTAVYYCATYSGSSHYWGQG

SEQ ID NO: 4676 - DNA, 129 bp, Artificial Sequence
  Description of Artificial Sequence: Synthetic antibody
cggttcaccatctccagacataataccaagaacacgctgtatctgcaaatgaagagcctgagagccgaggacacggccgtatattactgtgcgacatatagtgggagctctcactactggggccaggga

SEQ ID NO: 4677 - protein, 43 aa, Artificial Sequence
  Description of Artificial Sequence: Synthetic antibody
RFTISRHNTKNTLYLQMKSLRAEDTAVYYCATYSGSSHYWGQG

SEQ ID NO: 4678 - protein, 13 aa, Artificial Sequence
  Description of Artificial Sequence: Synthetic antibody
CARDLETDTFDYW

SEQ ID NO: 4679 - DNA, 129 bp, Artificial Sequence
  Description of Artificial Sequence: Synthetic antibody
accatctccagagacaacgccaggaacaccttatatctgcaaatgaacagtctgagagccgaggacacggctgtgtattactgtgcaagagatctggagactgatacctttgactactggggccaggga

SEQ ID NO: 4680 - protein, 43 aa, Artificial Sequence
  Description of Artificial Sequence: Synthetic antibody
TISRDNARNTLYLQMNSLRAEDTAVYYCARDLETDTFDYWGQG

SEQ ID NO: 4681 - DNA, 129 bp, Artificial Sequence
  Description of Artificial Sequence: Synthetic antibody
accatctccagagacaacgccaagaacacgctgtatctgcaaatgaacagtctgagagccgaggacacggctgtgtattactgtgcaagggatctggagactgatacctttgactactggggccaggga

SEQ ID NO: 4682 - protein, 43 aa, Artificial Sequence
  Description of Artificial Sequence: Synthetic antibody
TISRDNAKNTLYLQMNSLRAEDTAVYYCARDLETDTFDYWGQG

SEQ ID NO: 4683 - DNA, 129 bp, Artificial Sequence
  Description of Artificial Sequence: Synthetic antibody
accatctccagagacaacgccaagaacacgctgtatctgcaaatgaacagtctgagagccgaggacacggctgtgtattactgtgcaagagatctggagactgatacctttgactactggggccaggga

SEQ ID NO: 4684 - protein, 12 aa, Artificial Sequence
  Description of Artificial Sequence: Synthetic antibody
CTTPFFRVPQAW

SEQ ID NO: 4685 - DNA, 129 bp, Artificial Sequence
  Description of Artificial Sequence: Synthetic antibody
ttcaccatctcaagagatgattcaaataatattgtgtttctgcaaatgaacagcctgaaaaccgaggacacagccgtgtattactgtaccacccctttcttccgggtgccccaggcctggggccaggga

SEQ ID NO: 4686 - protein, 43 aa, Artificial Sequence
  Description of Artificial Sequence: Synthetic antibody
FTISRDDSNNIVFLQMNSLKTEDTAVYYCTTPFFRVPQAWGQG

SEQ ID NO: 4687 - DNA, 129 bp, Artificial Sequence
  Description of Artificial Sequence: Synthetic antibody
ttcaccatctcaagagatgattcaaataatattgtgtttctgcaaatgaacagcctgaaaaccgaggacacagccgcgtattactgtaccacccctttcttccgggtgccccaggcctggggccaggga

SEQ ID NO: 4688 - protein, 43 aa, Artificial Sequence
  Description of Artificial Sequence: Synthetic antibody
FTISRDDSNNIVFLQMNSLKTEDTAAYYCTTPFFRVPQAWGQG

SEQ ID NO: 4689 - DNA, 129 bp, Artificial Sequence
  Description of Artificial Sequence: Synthetic antibody
ttcaccatctcaagagatgattcaaataatattgtgtttccgcaaatgaacagcctgaaaaccgaggacacagccgcgtattactgtaccacccctttcttccgggtgccccaggcctggggccaggga

SEQ ID NO: 4690 - protein, 43 aa, Artificial Sequence
  Description of Artificial Sequence: Synthetic antibody
FTISRDDSNNIVFPQMNSLKTEDTAAYYCTTPFFRVPQAWGQG

SEQ ID NO: 4691 - protein, 16 aa, Artificial Sequence
  Description of Artificial Sequence: Synthetic antibody
CAREGGTIFGWGMDVW

SEQ ID NO: 4692 - DNA, 129 bp, Artificial Sequence
  Description of Artificial Sequence: Synthetic antibody
tgggacacatccgcgagtacagcctacatggagctgagcagcctgagatctgaagacacgtctgtctattactgtgcgagagaggggggtacgatttttgggtggggtatggacgtctggggccaaggg

SEQ ID NO: 4693 - protein, 43 aa, Artificial Sequence
  Description of Artificial Sequence: Synthetic antibody
WDTSASTAYMELSSLRSEDTSVYYCAREGGTIFGWGMDVWGQG

SEQ ID NO: 4694 - DNA, 129 bp, Artificial Sequence
  Description of Artificial Sequence: Synthetic antibody
tgggacacatccgcgagaacagcctacatggagctgagcagcctgagatctgaagacacgtctgtctattactgtgcgagagaggggggtacgatttttgggtggggtatggacgtctggggccaaggg

SEQ ID NO: 4695 - protein, 43 aa, Artificial Sequence
  Description of Artificial Sequence: Synthetic antibody
WDTSARTAYMELSSLRSEDTSVYYCAREGGTIFGWGMDVWGQG

SEQ ID NO: 4696 - DNA, 129 bp, Artificial Sequence
  Description of Artificial Sequence: Synthetic antibody
agggacacatccgcgagtacagcctacatggagctgagcagcctgagatctgaagacacgtctgtctattactgtgcgagagaggggggtacgatttttgggtggggtatggacgtctggggccaaggg

SEQ ID NO: 4697 - protein, 43 aa, Artificial Sequence
  Description of Artificial Sequence: Synthetic antibody
RDTSASTAYMELSSLRSEDTSVYYCAREGGTIFGWGMDVWGQG

SEQ ID NO: 4698 - protein, 16 aa, Artificial Sequence
  Description of Artificial Sequence: Synthetic antibody
CARDESSSSLNWFDPW

SEQ ID NO: 4699 - DNA, 129 bp, Artificial Sequence
  Description of Artificial Sequence: Synthetic antibody
tgggacacatccgcgagcatagtctacatggaactgagcagcctgagatctgaagacacggctgtatattactgtgcgagagacgaaagcagctcgtccctgaactggttcgacccctggggccaggga

SEQ ID NO: 4700 - protein, 43 aa, Artificial Sequence
  Description of Artificial Sequence: Synthetic antibody
WDTSASIVYMELSSLRSEDTAVYYCARDESSSSLNWFDPWGQG

SEQ ID NO: 4701 - DNA, 129 bp, Artificial Sequence
  Description of Artificial Sequence: Synthetic antibody
agggacacatccgcgagcatagtctacatggaactgagcagcctgagatctgaagacacggctgtatattactgtgcgagagacgaaagcagctcgtccctgaactggttcgacccctggggccaggga

SEQ ID NO: 4702 - protein, 43 aa, Artificial Sequence
  Description of Artificial Sequence: Synthetic antibody
RDTSASIVYMELSSLRSEDTAVYYCARDESSSSLNWFDPWGQG

SEQ ID NO: 4703 - DNA, 129 bp, Artificial Sequence
  Description of Artificial Sequence: Synthetic antibody
agggacacatccgcgagcacagtctacatggacctgagcagcctgagatctgaagacacggctgtttattactgtgcgagagacgaaagcagttcgtccctgaattggttcgacccctggggccaggga

SEQ ID NO: 4704 - protein, 43 aa, Artificial Sequence
  Description of Artificial Sequence: Synthetic antibody
RDTSASTVYMDLSSLRSEDTAVYYCARDESSSSLNWFDPWGQG

SEQ ID NO: 4705 - protein, 13 aa, Artificial Sequence
  Description of Artificial Sequence: Synthetic antibody
CARLLGGGGGQTW

SEQ ID NO: 4706 - DNA, 129 bp, Artificial Sequence
  Description of Artificial Sequence: Synthetic antibody
atcatctccatacacaacgccaagaacacgctgtatttgcaaatgaacagtctgagagccgaggacacggctgtctattactgtgcaagactcctgggtggggggggaggtcagacttggggccaggga

SEQ ID NO: 4707 - protein, 43 aa, Artificial Sequence
  Description of Artificial Sequence: Synthetic antibody
IISIHNAKNTLYLQMNSLRAEDTAVYYCARLLGGGGGQTWGQG

SEQ ID NO: 4708 - DNA, 129 bp, Artificial Sequence
  Description of Artificial Sequence: Synthetic antibody
atcatctccagagacaacgccaagaacacgctgtatttgcaaatgaacagtctgagagccgaggacacggctgtctattactgtgcaagactcctgggtggggggggaggtcagacttggggccaggga

SEQ ID NO: 4709 - protein, 43 aa, Artificial Sequence
  Description of Artificial Sequence: Synthetic antibody
IISRDNAKNTLYLQMNSLRAEDTAVYYCARLLGGGGGQTWGQG

SEQ ID NO: 4710 - DNA, 129 bp, Artificial Sequence
  Description of Artificial Sequence: Synthetic antibody
atcatctccagacacaacgccaagaacacgctgtatttgcaaatgaacagtctgagagccgaggacacggctgtctattactgtgcaagactcctgggtggggggggaggtcagacttggggccaggga

SEQ ID NO: 4711 - protein, 43 aa, Artificial Sequence
  Description of Artificial Sequence: Synthetic antibody
IISRHNAKNTLYLQMNSLRAEDTAVYYCARLLGGGGGQTWGQG

SEQ ID NO: 4712 - protein, 18 aa, Artificial Sequence
  Description of Artificial Sequence: Synthetic antibody
CARWIPMVHWPNDAFDIW

SEQ ID NO: 4713 - DNA, 129 bp, Artificial Sequence
  Description of Artificial Sequence: Synthetic antibody
acctccatatgcacagcctacttggagctgagcagcctgagatctgaggacacggccgtgtattactgtgcgagatggatccctatggttcattggccaaatgatgcttttgatatctggggccaaggg

SEQ ID NO: 4714 - protein, 43 aa, Artificial Sequence
  Description of Artificial Sequence: Synthetic antibody
TSICTAYLELSSLRSEDTAVYYCARWIPMVHWPNDAFDIWGQG

SEQ ID NO: 4715 - DNA, 129 bp, Artificial Sequence
  Description of Artificial Sequence: Synthetic antibody
acctccatatgcacagcctacatggagctgagcagcctgagatctgaggacacggccgtgtattactgtgcgagatggatccctatggttcattggccaaatgatgcttttgatatctggggccaaggg

SEQ ID NO: 4716 - protein, 43 aa, Artificial Sequence
  Description of Artificial Sequence: Synthetic antibody
TSICTAYMELSSLRSEDTAVYYCARWIPMVHWPNDAFDIWGQG

SEQ ID NO: 4717 - DNA, 129 bp, Artificial Sequence
  Description of Artificial Sequence: Synthetic antibody
acctccataagcacagcctacatggagctgagcagcctgagatctgaggacacggccgtgtattactgtgcgagatggatccctatggttcattggccaaatgatgcttttgatatctggggccaaggg

SEQ ID NO: 4718 - protein, 43 aa, Artificial Sequence
  Description of Artificial Sequence: Synthetic antibody
TSISTAYMELSSLRSEDTAVYYCARWIPMVHWPNDAFDIWGQG

SEQ ID NO: 4719 - protein, 16 aa, Artificial Sequence
  Description of Artificial Sequence: Synthetic antibody
CARRGSGSPATGIDYW

SEQ ID NO: 4720 - DNA, 129 bp, Artificial Sequence
  Description of Artificial Sequence: Synthetic antibody
tgggacacgccccagagcacagtctacatggacctgagcagcctcagaactaacgacacggccatgttttactgtgcgagaaggggatcggggagcccagctaccggcattgactactggggccaggga

SEQ ID NO: 4721 - protein, 43 aa, Artificial Sequence
  Description of Artificial Sequence: Synthetic antibody
WDTPQSTVYMDLSSLRTNDTAMFYCARRGSGSPATGIDYWGQG

SEQ ID NO: 4722 - DNA, 129 bp, Artificial Sequence
  Description of Artificial Sequence: Synthetic antibody
agggacacgtcccagagcacagtctacatggacctgagcagcctcagaactgacgacacggccatgttttactgtgcgagaaggggatcggggagcccagctaccggcattgactactggggccaggga

SEQ ID NO: 4723 - protein, 43 aa, Artificial Sequence
  Description of Artificial Sequence: Synthetic antibody
RDTSQSTVYMDLSSLRTDDTAMFYCARRGSGSPATGIDYWGQG

SEQ ID NO: 4724 - DNA, 129 bp, Artificial Sequence
  Description of Artificial Sequence: Synthetic antibody
agggacacgtcccagagcacagtctacatggacctgagcagcctcagaactaacgacacggccatgttttactgtgcgagaaggggatcggggagcccagctaccggcattgactactggggccaggga

SEQ ID NO: 4725 - protein, 43 aa, Artificial Sequence
  Description of Artificial Sequence: Synthetic antibody
RDTSQSTVYMDLSSLRTNDTAMFYCARRGSGSPATGIDYWGQG

SEQ ID NO: 4726 - protein, 16 aa, Artificial Sequence
  Description of Artificial Sequence: Synthetic antibody
CAKEVRERWPSGMDVW

SEQ ID NO: 4727 - DNA, 129 bp, Artificial Sequence
  Description of Artificial Sequence: Synthetic antibody
ttatataattccaagaacacgctgtatctgcaaatgaacagcctgagagccgaggacacggccgtatattactgtgcgaaagaggtccgggaacggtggcccagcggtatggacgtctggggccaaggg

SEQ ID NO: 4728 - protein, 43 aa, Artificial Sequence
  Description of Artificial Sequence: Synthetic antibody
LYNSKNTLYLQMNSLRAEDTAVYYCAKEVRERWPSGMDVWGQG

SEQ ID NO: 4729 - DNA, 129 bp, Artificial Sequence
  Description of Artificial Sequence: Synthetic antibody
ttagataattccaagaacacgctgtatctgcaaatgaacagcctgagagccgaggacacggccgtatattactgtgcgaaagaggtccgggaacggtggcccagcggtatggacgtctggggccaaggg

SEQ ID NO: 4730 - protein, 43 aa, Artificial Sequence
  Description of Artificial Sequence: Synthetic antibody
LDNSKNTLYLQMNSLRAEDTAVYYCAKEVRERWPSGMDVWGQG

SEQ ID NO: 4731 - DNA, 129 bp, Artificial Sequence
  Description of Artificial Sequence: Synthetic antibody
agagataattccaagaacacgctgtatctgcaaatgaacagcctgagagccgaggacacggccgtatattactgtgcgaaagaggtccgggaacggtggcccagcggtatggacgtctggggccaaggg

SEQ ID NO: 4732 - protein, 43 aa, Artificial Sequence
  Description of Artificial Sequence: Synthetic antibody
RDNSKNTLYLQMNSLRAEDTAVYYCAKEVRERWPSGMDVWGQG

SEQ ID NO: 4733 - protein, 16 aa, Artificial Sequence
  Description of Artificial Sequence: Synthetic antibody
CARDFSSSWYSYFQHW

SEQ ID NO: 4734 - DNA, 129 bp, Artificial Sequence
  Description of Artificial Sequence: Synthetic antibody
tgggacacgtccacgagcactgtctacatggagctgagcagcctgagatctgaggacacggccgtgtattactgtgcgagagattttagcagcagctggtatagctacttccagcactggggccagggc

SEQ ID NO: 4735 - protein, 43 aa, Artificial Sequence
  Description of Artificial Sequence: Synthetic antibody
WDTSTSTVYMELSSLRSEDTAVYYCARDFSSSWYSYFQHWGQG

SEQ ID NO: 4736 - DNA, 129 bp, Artificial Sequence
  Description of Artificial Sequence: Synthetic antibody
tgggacacgtccacgagcacagtctacatggagctgagcagcctgagatctgaggacacggccgtgtattactgtgcgagagattttagcagcagctggtatagctacttccagcactggggccagggc

SEQ ID NO: 4737 - DNA, 129 bp, Artificial Sequence
  Description of Artificial Sequence: Synthetic antibody
agggacacgtccacgagcacagtctacatggagctgagcagcctgagatctgaggacacggccgtgtattactgtgcgagagattttagcagcagctggtatagctacttccagcactggggccagggc

SEQ ID NO: 4738 - protein, 43 aa, Artificial Sequence
  Description of Artificial Sequence: Synthetic antibody
RDTSTSTVYMELSSLRSEDTAVYYCARDFSSSWYSYFQHWGQG

SEQ ID NO: 4739 - protein, 12 aa, Artificial Sequence
  Description of Artificial Sequence: Synthetic antibody
CARGVYGSGDDW

SEQ ID NO: 4740 - DNA, 129 bp, Artificial Sequence
  Description of Artificial Sequence: Synthetic antibody
ttcaccatctccagagacaattccaagaacacgctgtatcttcaaatgaacagcctgagagccgaggacacggccgtgtattactgtgcgagaggggtgtatggttcgggagacgattggggccaggga

SEQ ID NO: 4741 - protein, 43 aa, Artificial Sequence
  Description of Artificial Sequence: Synthetic antibody
FTISRDNSKNTLYLQMNSLRAEDTAVYYCARGVYGSGDDWGQG

SEQ ID NO: 4742 - DNA, 129 bp, Artificial Sequence
  Description of Artificial Sequence: Synthetic antibody
ttcaccatctccagacacaattccaagaacacgctgtatcttcaaatgaacagcctgagagccgaggacacggccgtgtattactgtgcgagaggggtgtatggttcgggagacgattggggccaggga

SEQ ID NO: 4743 - protein, 43 aa, Artificial Sequence
  Description of Artificial Sequence: Synthetic antibody
FTISRHNSKNTLYLQMNSLRAEDTAVYYCARGVYGSGDDWGQG

SEQ ID NO: 4744 - DNA, 129 bp, Artificial Sequence
  Description of Artificial Sequence: Synthetic antibody
ttcaccatctccagacacaattccaagaacacgctgtatcttcaaatcaacagcctgagagccgaggacacggccgtgtattactgtgcgagaggggtgtatggttcgggagacgattggggccaggga

SEQ ID NO: 4745 - protein, 43 aa, Artificial Sequence
  Description of Artificial Sequence: Synthetic antibody
FTISRHNSKNTLYLQINSLRAEDTAVYYCARGVYGSGDDWGQG

SEQ ID NO: 4746 - protein, 15 aa, Artificial Sequence
  Description of Artificial Sequence: Synthetic antibody
CAKGAIAVAGMTDYW

SEQ ID NO: 4747 - DNA, 129 bp, Artificial Sequence
  Description of Artificial Sequence: Synthetic antibody
tccattaataattccaagaacacgctgaatctgcaaatgaacagcctgagagccgaggacacggccgtatattactgtgcgaaaggggctatagcagtggctggtatgactgactactggggccaggga

SEQ ID NO: 4748 - protein, 43 aa, Artificial Sequence
  Description of Artificial Sequence: Synthetic antibody
SINNSKNTLNLQMNSLRAEDTAVYYCAKGAIAVAGMTDYWGQG

SEQ ID NO: 4749 - DNA, 129 bp, Artificial Sequence
  Description of Artificial Sequence: Synthetic antibody
tccagagatgattcaaagaacacggcgtatctgcaaatgaacagcctgagagccgaggacacggccgtatattactgtgcgaaaggggctatagcagtggctggtatgactgactactggggccaggga

SEQ ID NO: 4750 - protein, 43 aa, Artificial Sequence
  Description of Artificial Sequence: Synthetic antibody
SRDDSKNTAYLQMNSLRAEDTAVYYCAKGAIAVAGMTDYWGQG

SEQ ID NO: 4751 - DNA, 129 bp, Artificial Sequence
  Description of Artificial Sequence: Synthetic antibody
tccagagataattccaagaacacgctgtatctgcaaatgaacagcctgagagccgaggacacggccgtatattactgtgcgaaaggggctatagcagtggctggtatgactgactactggggccaggga

SEQ ID NO: 4752 - protein, 43 aa, Artificial Sequence
  Description of Artificial Sequence: Synthetic antibody
SRDNSKNTLYLQMNSLRAEDTAVYYCAKGAIAVAGMTDYWGQG

SEQ ID NO: 4753 - protein, 21 aa, Artificial Sequence
  Description of Artificial Sequence: Synthetic antibody
CTRHWDSGYDSMDYYYGMDVW

SEQ ID NO: 4754 - DNA, 129 bp, Artificial Sequence
  Description of Artificial Sequence: Synthetic antibody
aacacggcgtatctgcaaatgaacagcctgaaaaccgaggacacggccgtgtattactgtactagacattgggatagtggctacgattcgatggactactactacggtatggacgtctggggccaaggg

SEQ ID NO: 4755 - protein, 43 aa, Artificial Sequence
  Description of Artificial Sequence: Synthetic antibody
NTAYLQMNSLKTEDTAVYYCTRHWDSGYDSMDYYYGMDVWGQG

SEQ ID NO: 4756 - DNA, 129 bp, Artificial Sequence
  Description of Artificial Sequence: Synthetic antibody
tacacggcgtatctgcaaatgaacagcctgaaaaccgaggacacggccgtgtattactgtactagacattgggatagtggctacgattcgatggactactactacggtatggacgtctggggccaaggg

SEQ ID NO: 4757 - protein, 43 aa, Artificial Sequence
  Description of Artificial Sequence: Synthetic antibody
YTAYLQMNSLKTEDTAVYYCTRHWDSGYDSMDYYYGMDVWGQG

SEQ ID NO: 4758 - DNA, 129 bp, Artificial Sequence
  Description of Artificial Sequence: Synthetic antibody
aacacggcgtatctgcaaatcaacagcctgaaaaccgaggacacggccgtgtattactgtactagacattgggatagtggctacgattcgatggactactactacggtatggacgtctggggccaaggg

SEQ ID NO: 4759 - protein, 43 aa, Artificial Sequence
  Description of Artificial Sequence: Synthetic antibody
NTAYLQINSLKTEDTAVYYCTRHWDSGYDSMDYYYGMDVWGQG

SEQ ID NO: 4760 - protein, 13 aa, Artificial Sequence
  Description of Artificial Sequence: Synthetic antibody
CAHRRDNSWYDYW

SEQ ID NO: 4761 - DNA, 129 bp, Artificial Sequence
  Description of Artificial Sequence: Synthetic antibody
accatcaccacggacacctccaaaaagcaggtggtccttacaatgaccaacatggaccctgtggacacagccacatattactgtgcacacagacgtgacaatagctggtatgactactggggcctggga

SEQ ID NO: 4762 - protein, 43 aa, Artificial Sequence
  Description of Artificial Sequence: Synthetic antibody
TITTDTSKKQVVLTMTNMDPVDTATYYCAHRRDNSWYDYWGLG

SEQ ID NO: 4763 - DNA, 129 bp, Artificial Sequence
  Description of Artificial Sequence: Synthetic antibody
accatcaccacggacacctccaaaaaccaggtagtccttacaatgaccaacatggaccctgtggacacagccacatattactgtgcacacagacgtgacaatagctggtatgactactggggcctggga

SEQ ID NO: 4764 - protein, 43 aa, Artificial Sequence
  Description of Artificial Sequence: Synthetic antibody
TITTDTSKNQVVLTMTNMDPVDTATYYCAHRRDNSWYDYWGLG

SEQ ID NO: 4765 - DNA, 129 bp, Artificial Sequence
  Description of Artificial Sequence: Synthetic antibody
accatcaccacggacacctccaaaaaccaggtagtccttacaatgaccaacatggaccctgtggacacagccacatattactgtgcacacagacgtgacaatagctggtatgactactggggccagggc

SEQ ID NO: 4766 - protein, 43 aa, Artificial Sequence
  Description of Artificial Sequence: Synthetic antibody
TITTDTSKNQVVLTMTNMDPVDTATYYCAHRRDNSWYDYWGQG

SEQ ID NO: 4767 - protein, 17 aa, Artificial Sequence
  Description of Artificial Sequence: Synthetic antibody
CAKEGKIVGATMPFDYW

SEQ ID NO: 4768 - DNA, 129 bp, Artificial Sequence
  Description of Artificial Sequence: Synthetic antibody
gacaattccaagaacacgctgtatctgcaaatgaacagcctgagagccgaggacacggccgtatattactgtgcgaaagaggggaagatagtgggagctactatgccttttgactactggggccaggga

SEQ ID NO: 4769 - protein, 43 aa, Artificial Sequence
  Description of Artificial Sequence: Synthetic antibody
DNSKNTLYLQMNSLRAEDTAVYYCAKEGKIVGATMPFDYWGQG

SEQ ID NO: 4770 - DNA, 129 bp, Artificial Sequence
  Description of Artificial Sequence: Synthetic antibody
gacaatcccaacaacacgctgtatctgcaaatgaacagcctgagagccgaggacacggccgtatattactgtgcgaaagaggggaagatagtgggagctactatgccttttgactactggggccaggga

SEQ ID NO: 4771 - protein, 43 aa, Artificial Sequence
  Description of Artificial Sequence: Synthetic antibody
DNPNNTLYLQMNSLRAEDTAVYYCAKEGKIVGATMPFDYWGQG

SEQ ID NO: 4772 - DNA, 129 bp, Artificial Sequence
  Description of Artificial Sequence: Synthetic antibody
gaaaattccaacaacacgctgtatctgcaaatgaacagcctgagagccgaggacacggccgtatattactgtgcgaaagaggggaagatagtgggagctactatgccttttgactactggggccaggga

SEQ ID NO: 4773 - protein, 43 aa, Artificial Sequence
  Description of Artificial Sequence: Synthetic antibody
ENSNNTLYLQMNSLRAEDTAVYYCAKEGKIVGATMPFDYWGQG

SEQ ID NO: 4774 - protein, 14 aa, Artificial Sequence
  Description of Artificial Sequence: Synthetic antibody
CAKDLSNSGATEYW

SEQ ID NO: 4775 - DNA, 129 bp, Artificial Sequence
  Description of Artificial Sequence: Synthetic antibody
atctccatatataattccaagaacacgctgtatctgcaaatgaacagcctgagagccgaggacacggccgtatattactgtgcgaaagacctatcaaatagtggtgctactgaatactggggccaggga

SEQ ID NO: 4776 - protein, 43 aa, Artificial Sequence
  Description of Artificial Sequence: Synthetic antibody
ISIYNSKNTLYLQMNSLRAEDTAVYYCAKDLSNSGATEYWGQG

SEQ ID NO: 4777 - DNA, 129 bp, Artificial Sequence
  Description of Artificial Sequence: Synthetic antibody
atctccatacataattccaagaacacgctgtatctgcaaatgaacagcctgagagccgaggacacggccgtatattactgtgcgaaagacctatcaaatagtggtgctactgaatactggggccaggga

SEQ ID NO: 4778 - protein, 43 aa, Artificial Sequence
  Description of Artificial Sequence: Synthetic antibody
ISIHNSKNTLYLQMNSLRAEDTAVYYCAKDLSNSGATEYWGQG

SEQ ID NO: 4779 - DNA, 129 bp, Artificial Sequence
  Description of Artificial Sequence: Synthetic antibody
atctccagagataattccaagaacacgctgtatctgcaaatgaacagcctgagagccgaggacacggccgtatattactgtgcgaaagacctatcaaatagtggtgctactgaatactggggccaggga

SEQ ID NO: 4780 - protein, 43 aa, Artificial Sequence
  Description of Artificial Sequence: Synthetic antibody
ISRDNSKNTLYLQMNSLRAEDTAVYYCAKDLSNSGATEYWGQG

SEQ ID NO: 4781 - protein, 22 aa, Artificial Sequence
  Description of Artificial Sequence: Synthetic antibody
CARVRSYDSTAYDEPLDALDIW

SEQ ID NO: 4782 - DNA, 129 bp, Artificial Sequence
  Description of Artificial Sequence: Synthetic antibody
acagcctacttggagttgcgctgcctgagatctgaagacacggctgtatattactgtgcgagagttcggtcctatgatagtactgcgtatgacgaaccccttgatgctcttgatatctggggccaaggg

SEQ ID NO: 4783 - protein, 43 aa, Artificial Sequence
  Description of Artificial Sequence: Synthetic antibody
TAYLELRCLRSEDTAVYYCARVRSYDSTAYDEPLDALDIWGQG

SEQ ID NO: 4784 - DNA, 129 bp, Artificial Sequence
  Description of Artificial Sequence: Synthetic antibody
acagcctacttggagttgcgcagcctgagatctgaagacacggctgtatattactgtgcgagagttcggtcctatgatagtactgcgtatgacgaaccccttgatgctcttgatatctggggccaaggg

SEQ ID NO: 4785 - protein, 43 aa, Artificial Sequence
  Description of Artificial Sequence: Synthetic antibody
TAYLELRSLRSEDTAVYYCARVRSYDSTAYDEPLDALDIWGQG

SEQ ID NO: 4786 - DNA, 129 bp, Artificial Sequence
  Description of Artificial Sequence: Synthetic antibody
acagcctacatggagttgcgcagcctgagatctgaagacacggctgtatattactgtgcgagagttcggtcctatgatagtactgcgtatgacgaaccccttgatgctcttgatatctggggccaaggg

SEQ ID NO: 4787 - protein, 43 aa, Artificial Sequence
  Description of Artificial Sequence: Synthetic antibody
TAYMELRSLRSEDTAVYYCARVRSYDSTAYDEPLDALDIWGQG

SEQ ID NO: 4788 - protein, 14 aa, Artificial Sequence
  Description of Artificial Sequence: Synthetic antibody
CAKARGVGGPFDYW

SEQ ID NO: 4789 - DNA, 129 bp, Artificial Sequence
  Description of Artificial Sequence: Synthetic antibody
atctccatagacaattccaagaacacgctgtatctgcaaatgaacagcctgagagccgaggacacggctgtgtattactgtgcgaaagcccggggggtgggcgggccgtttgactactggggccaggga

SEQ ID NO: 4790 - protein, 43 aa, Artificial Sequence
  Description of Artificial Sequence: Synthetic antibody
ISIDNSKNTLYLQMNSLRAEDTAVYYCAKARGVGGPFDYWGQG

SEQ ID NO: 4791 - DNA, 129 bp, Artificial Sequence
  Description of Artificial Sequence: Synthetic antibody
atctccatacacaattccaagaacacgctgtatctgcaaatgaacagcctgagagccgaggacacggctgtgtattactgtgcgaaagcccggggggtgggcgggccgtttgactactggggccaggga

SEQ ID NO: 4792 - protein, 43 aa, Artificial Sequence
  Description of Artificial Sequence: Synthetic antibody
ISIHNSKNTLYLQMNSLRAEDTAVYYCAKARGVGGPFDYWGQG

SEQ ID NO: 4793 - DNA, 129 bp, Artificial Sequence
  Description of Artificial Sequence: Synthetic antibody
atctccagagacaattccaagaacacgctgtatctgcaaatgaacagcctgagagccgaggacacggctgtgtattactgtgcgaaagcccggggggtgggcgggccgtttgactactggggccaggga

SEQ ID NO: 4794 - protein, 43 aa, Artificial Sequence
  Description of Artificial Sequence: Synthetic antibody
ISRDNSKNTLYLQMNSLRAEDTAVYYCAKARGVGGPFDYWGQG

SEQ ID NO: 4795 - protein, 15 aa, Artificial Sequence
  Description of Artificial Sequence: Synthetic antibody
CTRYGDTRDWVFDLW

SEQ ID NO: 4796 - DNA, 129 bp, Artificial Sequence
  Description of Artificial Sequence: Synthetic antibody
ccagagatgattcagagaaccacggcgtatctgcaaatgaacagcctgaagaccgaggacacggccgtgtattactgtactagatacggtgacaccagggactgggtcttcgatctgtggggccgtggc

SEQ ID NO: 4797 - protein, 43 aa, Artificial Sequence
  Description of Artificial Sequence: Synthetic antibody
PEMIQRTTAYLQMNSLKTEDTAVYYCTRYGDTRDWVFDLWGRG

SEQ ID NO: 4798 - DNA, 129 bp, Artificial Sequence
  Description of Artificial Sequence: Synthetic antibody
tccagagattattcagacaacacggcgtatctgcaaatgaacagcctgaagaccgaggacacggccgtgtattactgtactagatacggtgacaccagggactgggtcttcgatctgtggggccgtggc

SEQ ID NO: 4799 - protein, 43 aa, Artificial Sequence
  Description of Artificial Sequence: Synthetic antibody
SRDYSDNTAYLQMNSLKTEDTAVYYCTRYGDTRDWVFDLWGRG

SEQ ID NO: 4800 - DNA, 129 bp, Artificial Sequence
  Description of Artificial Sequence: Synthetic antibody
tccagagatgattcagagaacacggcgtatctgcaaatgaacagcctgaagaccgaggacacggccgtgtattactgtactagatacggtgacaccagggactgggtcttcgatctgtggggccgtggc

SEQ ID NO: 4801 - protein, 43 aa, Artificial Sequence
  Description of Artificial Sequence: Synthetic antibody
SRDDSENTAYLQMNSLKTEDTAVYYCTRYGDTRDWVFDLWGRG

SEQ ID NO: 4802 - protein, 17 aa, Artificial Sequence
  Description of Artificial Sequence: Synthetic antibody
CAHTPGGSELREGIDYW

SEQ ID NO: 4803 - DNA, 129 bp, Artificial Sequence
  Description of Artificial Sequence: Synthetic antibody
gacacctccaaaaaccaggtggtccttacaatgaccaacatggaccctgtggacacagccacatattactgtgcacacacccccggtggctctgaattacgggaggggattgactactggggccaggga

SEQ ID NO: 4804 - protein, 43 aa, Artificial Sequence
  Description of Artificial Sequence: Synthetic antibody
DTSKNQVVLTMTNMDPVDTATYYCAHTPGGSELREGIDYWGQG

SEQ ID NO: 4805 - DNA, 129 bp, Artificial Sequence
  Description of Artificial Sequence: Synthetic antibody
ggacacctccaaaaccaggtggtccttacaatgaccaacatggaccctgtggacacagccacatattactgtgcacacacccccggtggctctgaattacgggaggggattgactactggggccaggga

SEQ ID NO: 4806 - protein, 43 aa, Artificial Sequence
  Description of Artificial Sequence: Synthetic antibody
GHLQNQVVLTMTNMDPVDTATYYCAHTPGGSELREGIDYWGQG

SEQ ID NO: 4807 - DNA, 129 bp, Artificial Sequence
  Description of Artificial Sequence: Synthetic antibody
ggacacctccaaaaaccaggtggtccttcaatgaccaacatggaccctgtggacacagccacatattactgtgcacacacccccggtggctctgaattacgggaggggattgactactggggccaggga

SEQ ID NO: 4808 - protein, 43 aa, Artificial Sequence
  Description of Artificial Sequence: Synthetic antibody
GHLQKPGGPSMTNMDPVDTATYYCAHTPGGSELREGIDYWGQG

SEQ ID NO: 4809 - protein, 22 aa, Artificial Sequence
  Description of Artificial Sequence: Synthetic antibody
CARYHILTGQYMDYYYYGLDVW

SEQ ID NO: 4810 - DNA, 129 bp, Artificial Sequence
  Description of Artificial Sequence: Synthetic antibody
tatctgcatctgcagatgagcagcctgagagccggcgacacggccgtatattattgtgcgaggtaccatattttgactggtcagtatatggactactactactacggtctggacgtctggggccaaggg

SEQ ID NO: 4811 - protein, 43 aa, Artificial Sequence
  Description of Artificial Sequence: Synthetic antibody
YLHLQMSSLRAGDTAVYYCARYHILTGQYMDYYYYGLDVWGQG

SEQ ID NO: 4812 - DNA, 129 bp, Artificial Sequence
  Description of Artificial Sequence: Synthetic antibody
actctgcatctgcagatgagcagcctgagagccggcgacacggccgtatattattgtgcgaggtaccatattttgactggtcagtatatggactactactactacggtctggacgtctggggccaaggg

SEQ ID NO: 4813 - protein, 43 aa, Artificial Sequence
  Description of Artificial Sequence: Synthetic antibody
TLHLQMSSLRAGDTAVYYCARYHILTGQYMDYYYYGLDVWGQG

SEQ ID NO: 4814 - DNA, 129 bp, Artificial Sequence
  Description of Artificial Sequence: Synthetic antibody
actatgcatctgctgatgagcagcctgagagccggcgacacggccgtatattattgtgcgaggtaccatattttgactggtcagtatatggactactactactacggtctggacgtctggggccaaggg

SEQ ID NO: 4815 - protein, 43 aa, Artificial Sequence
  Description of Artificial Sequence: Synthetic antibody
TMHLLMSSLRAGDTAVYYCARYHILTGQYMDYYYYGLDVWGQG

SEQ ID NO: 4816 - protein, 16 aa, Artificial Sequence
  Description of Artificial Sequence: Synthetic antibody
CATNIAAAGTDAFDIW

SEQ ID NO: 4817 - DNA, 129 bp, Artificial Sequence
  Description of Artificial Sequence: Synthetic antibody
gaggacacatctacagacacagcctacatggagctgagcagcctgagatctgaggacacggccgtgtattactgtgcaacaaatatagcagcagctggtactgatgcttttgatatctggggccaaggg

SEQ ID NO: 4818 - protein, 43 aa, Artificial Sequence
  Description of Artificial Sequence: Synthetic antibody
EDTSTDTAYMELSSLRSEDTAVYYCATNIAAAGTDAFDIWGQG

SEQ ID NO: 4819 - DNA, 129 bp, Artificial Sequence
  Description of Artificial Sequence: Synthetic antibody
gaggacacatctacagacacagcctacacggagctgagcagcctgagatctgaggacacggccgtgtactactgtgcaacaaatatagcagcagctggtactgatgcttttgatatctggggccaaggg

SEQ ID NO: 4820 - protein, 43 aa, Artificial Sequence
  Description of Artificial Sequence: Synthetic antibody
EDTSTDTAYTELSSLRSEDTAVYYCATNIAAAGTDAFDIWGQG

SEQ ID NO: 4821 - DNA, 129 bp, Artificial Sequence
  Description of Artificial Sequence: Synthetic antibody
gaggacacatatacagacacagcctacatggagctgagcagcctgagatctgaggacacggccgtgtattactgtgcaacaaatatagcagcagctggtactgatgcttttgatatctggggccaaggg

SEQ ID NO: 4822 - protein, 43 aa, Artificial Sequence
  Description of Artificial Sequence: Synthetic antibody
EDTYTDTAYMELSSLRSEDTAVYYCATNIAAAGTDAFDIWGQG

SEQ ID NO: 4823 - protein, 22 aa, Artificial Sequence
  Description of Artificial Sequence: Synthetic antibody
CAKDGRLIAAAGREWYWYFDLW

SEQ ID NO: 4824 - DNA, 129 bp, Artificial Sequence
  Description of Artificial Sequence: Synthetic antibody
acgctgtatctgcaaatgaacagcctgagagccgaggacacggccgtatattactgtgcgaaagatgggaggcttatagcagcagctggtagagagtggtactggtacttcgatctctggggccgtggc

SEQ ID NO: 4825 - protein, 43 aa, Artificial Sequence
  Description of Artificial Sequence: Synthetic antibody
TLYLQMNSLRAEDTAVYYCAKDGRLIAAAGREWYWYFDLWGRG

SEQ ID NO: 4826 - DNA, 129 bp, Artificial Sequence
  Description of Artificial Sequence: Synthetic antibody
acgctgtatctgcaaatgaacagcctgagagccgaggacacggccgtatattactgtgcgaaagatgggaggcttatagcagcagccggtagagagtggtactggtacttcgatctctggggccgtggc

SEQ ID NO: 4827 - DNA, 129 bp, Artificial Sequence
  Description of Artificial Sequence: Synthetic antibody
aagatgtatctgcaaatgaacagcctgagagccgaggacacggccgtatattactgtgcgaaagatgggaggcttatagcagcagctggtagagagtggtactggtacttcgatctctggggccgtggc

SEQ ID NO: 4828 - protein, 43 aa, Artificial Sequence
  Description of Artificial Sequence: Synthetic antibody
KMYLQMNSLRAEDTAVYYCAKDGRLIAAAGREWYWYFDLWGRG

SEQ ID NO: 4829 - protein, 8 aa, Artificial Sequence
  Description of Artificial Sequence: Synthetic antibody
CAKDTGNW

SEQ ID NO: 4830 - DNA, 129 bp, Artificial Sequence
  Description of Artificial Sequence: Synthetic antibody
gtgaagggccggttcaccatctccagatataattccaagaacacgctgtatctgcaaattaacagcctgagagccgaggacacggccgtatattactgtgcgaaagatacgggcaactggggccaggga

SEQ ID NO: 4831 - protein, 43 aa, Artificial Sequence
  Description of Artificial Sequence: Synthetic antibody
VKGRFTISRYNSKNTLYLQINSLRAEDTAVYYCAKDTGNWGQG

SEQ ID NO: 4832 - DNA, 129 bp, Artificial Sequence
  Description of Artificial Sequence: Synthetic antibody
gtgaagggccggttcaccatctccagatataattccaagaacacgctgtatctgaaaatgaacagcctgagagccgaggacacggccgtatattactgtgcgaaagatacgggcaactggggccaggga

SEQ ID NO: 4833 - protein, 43 aa, Artificial Sequence
  Description of Artificial Sequence: Synthetic antibody
VKGRFTISRYNSKNTLYLKMNSLRAEDTAVYYCAKDTGNWGQG

SEQ ID NO: 4834 - DNA, 129 bp, Artificial Sequence
  Description of Artificial Sequence: Synthetic antibody
gtgaagggccggttcaccatctccagagataattccaagaacacgctgtatctgcaaatgaacagcctgagagccgaggacacggccgtatattactgtgcgaaagatacgggcaactggggccaggga

SEQ ID NO: 4835 - protein, 43 aa, Artificial Sequence
  Description of Artificial Sequence: Synthetic antibody
VKGRFTISRDNSKNTLYLQMNSLRAEDTAVYYCAKDTGNWGQG

SEQ ID NO: 4836 - protein, 13 aa, Artificial Sequence
  Description of Artificial Sequence: Synthetic antibody
CAKGYTSGWYDYW

SEQ ID NO: 4837 - DNA, 129 bp, Artificial Sequence
  Description of Artificial Sequence: Synthetic antibody
accatctccatacacaattccaagagcacgctgcatctgcaaatgagcagcctgagagccgaggacacggccgtatatttctgtgcgaagggatatacgagtggctggtacgactactggggccaggga

SEQ ID NO: 4838 - protein, 43 aa, Artificial Sequence
  Description of Artificial Sequence: Synthetic antibody
TISIHNSKSTLHLQMSSLRAEDTAVYFCAKGYTSGWYDYWGQG

SEQ ID NO: 4839 - DNA, 129 bp, Artificial Sequence
  Description of Artificial Sequence: Synthetic antibody
accatctccagagacaattccaagagcacgctgcatctgcaaatgagcagcctgagagccgaggacacggccgtatatttctgtgcgaagggatatacgagtggctggtacgactactggggccaggga

SEQ ID NO: 4840 - protein, 43 aa, Artificial Sequence
  Description of Artificial Sequence: Synthetic antibody
TISRDNSKSTLHLQMSSLRAEDTAVYFCAKGYTSGWYDYWGQG

SEQ ID NO: 4841 - DNA, 129 bp, Artificial Sequence
  Description of Artificial Sequence: Synthetic antibody
aacatctccatagacaattccaagagcacgctgcatctgcaaatgagcagcctgagagccgaggacacggccgtatatttctgtgcgaagggatatacgagtggctggtacgactactggggccaggga

SEQ ID NO: 4842 - protein, 43 aa, Artificial Sequence
  Description of Artificial Sequence: Synthetic antibody
NISIDNSKSTLHLQMSSLRAEDTAVYFCAKGYTSGWYDYWGQG

SEQ ID NO: 4843 - protein, 16 aa, Artificial Sequence
  Description of Artificial Sequence: Synthetic antibody
CAHINSEYYYYGMDVW

SEQ ID NO: 4844 - DNA, 129 bp, Artificial Sequence
  Description of Artificial Sequence: Synthetic antibody
caaggacacctccaaaaccaggtggtccttacaatgaccaacatggaccctgtggacacagccacatattactgtgcacacattaacagcgagtactactactacggtatggacgtctggggccaaggg

SEQ ID NO: 4845 - protein, 43 aa, Artificial Sequence
  Description of Artificial Sequence: Synthetic antibody
QGHLQNQVVLTMTNMDPVDTATYYCAHINSEYYYYGMDVWGQG

SEQ ID NO: 4846 - DNA, 129 bp, Artificial Sequence
  Description of Artificial Sequence: Synthetic antibody
agggacacctccaaaaaccaggtggtccttacagtgaccaacatggaccctgtggacacagccacatattactgtgcacacattaacagcgagtactactactacggtatggacgtctggggccaaggg

SEQ ID NO: 4847 - protein, 43 aa, Artificial Sequence
  Description of Artificial Sequence: Synthetic antibody
RDTSKNQVVLTVTNMDPVDTATYYCAHINSEYYYYGMDVWGQG

SEQ ID NO: 4848 - DNA, 129 bp, Artificial Sequence
  Description of Artificial Sequence: Synthetic antibody
aaggacacctccaaaaaccaggtggtccttacaatgaccaacatggaccctgtggacacagccacatattactgtgcacacattaacagcgagtactactactacggtatggacgtctggggccaaggg

SEQ ID NO: 4849 - protein, 43 aa, Artificial Sequence
  Description of Artificial Sequence: Synthetic antibody
KDTSKNQVVLTMTNMDPVDTATYYCAHINSEYYYYGMDVWGQG

SEQ ID NO: 4850 - protein, 13 aa, Artificial Sequence
  Description of Artificial Sequence: Synthetic antibody
CARENSGYGFDYW

SEQ ID NO: 4851 - DNA, 129 bp, Artificial Sequence
  Description of Artificial Sequence: Synthetic antibody
accatctccagagaaaatgccaagaactccttgtatcttcaaatgaacagcctgagagccggggacacggctgtgtattactgtgcaagagaaaatagtggctacgggtttgactactggggccaggga

SEQ ID NO: 4852 - protein, 43 aa, Artificial Sequence
  Description of Artificial Sequence: Synthetic antibody
TISRENAKNSLYLQMNSLRAGDTAVYYCARENSGYGFDYWGQG

SEQ ID NO: 4853 - DNA, 129 bp, Artificial Sequence
  Description of Artificial Sequence: Synthetic antibody
aacatctccatagaaaatgccaagaactccttgtatcttcaaatgaacagcctgagagccggggacacggctgtgtattactgtgcaagagaaaatagtggctacgggtttgactactggggccaggga

SEQ ID NO: 4854 - protein, 43 aa, Artificial Sequence
  Description of Artificial Sequence: Synthetic antibody
NISIENAKNSLYLQMNSLRAGDTAVYYCARENSGYGFDYWGQG

SEQ ID NO: 4855 - DNA, 129 bp, Artificial Sequence
  Description of Artificial Sequence: Synthetic antibody
aacatctccagagaaaatgccaagaactccttgtatcttcaaatgaacagcctgagagccggtgacacggctgtgtattactgtgcaagagaaaatagtggctacgggtttgactactggggccaggga

SEQ ID NO: 4856 - protein, 43 aa, Artificial Sequence
  Description of Artificial Sequence: Synthetic antibody
NISRENAKNSLYLQMNSLRAGDTAVYYCARENSGYGFDYWGQG

SEQ ID NO: 4857 - protein, 16 aa, Artificial Sequence
  Description of Artificial Sequence: Synthetic antibody
CARGVSSSWYAWFDPW

SEQ ID NO: 4858 - DNA, 129 bp, Artificial Sequence
  Description of Artificial Sequence: Synthetic antibody
tgggacacgtccacgagcacagtctacatggagctgagcagcctgagatctgaggacacggccgtgtattactgtgcgagaggggttagcagcagctggtatgcttggttcgacccctggggccaggga

SEQ ID NO: 4859 - protein, 43 aa, Artificial Sequence
  Description of Artificial Sequence: Synthetic antibody
WDTSTSTVYMELSSLRSEDTAVYYCARGVSSSWYAWFDPWGQG

SEQ ID NO: 4860 - DNA, 129 bp, Artificial Sequence
  Description of Artificial Sequence: Synthetic antibody
tgggacacgcccacgagcacagtctacatggagctgagcagcctgagatctgaggacacggccgtgtattactgtgcgagaggggttagcagcagctggtatgcttggttcgacccctggggccaggga

SEQ ID NO: 4861 - protein, 43 aa, Artificial Sequence
  Description of Artificial Sequence: Synthetic antibody
WDTPTSTVYMELSSLRSEDTAVYYCARGVSSSWYAWFDPWGQG

SEQ ID NO: 4862 - DNA, 129 bp, Artificial Sequence
  Description of Artificial Sequence: Synthetic antibody
agggacacgtccacgagcacagtctacatggagctgagcagcctgagatctgaggacacggccgtgtattactgtgcgagaggggttagcagcagctggtatgcttggttcgacccctggggccaggga

SEQ ID NO: 4863 - protein, 43 aa, Artificial Sequence
  Description of Artificial Sequence: Synthetic antibody
RDTSTSTVYMELSSLRSEDTAVYYCARGVSSSWYAWFDPWGQG

SEQ ID NO: 4864 - protein, 22 aa, Artificial Sequence
  Description of Artificial Sequence: Synthetic antibody
CTTDAWDIVVVPAAMHAHFDYW

SEQ ID NO: 4865 - DNA, 129 bp, Artificial Sequence
  Description of Artificial Sequence: Synthetic antibody
acgctgtatctgcgaatgaacagcctgaaaaccgaggacacagccgtgtattactgtaccacagatgcttgggatattgtagtagtaccagctgctatgcatgctcattttgactactggggccaggga

SEQ ID NO: 4866 - protein, 43 aa, Artificial Sequence
  Description of Artificial Sequence: Synthetic antibody
TLYLRMNSLKTEDTAVYYCTTDAWDIVVVPAAMHAHFDYWGQG

SEQ ID NO: 4867 - DNA, 129 bp, Artificial Sequence
  Description of Artificial Sequence: Synthetic antibody
acgctgtatctgcaaatgaacagcctgaaaaccgaggacacagccgtgtattactgtaccacagatgcttgggatattgtagtagtaccagctgctatgcatgctcattttgactactggggccaggga

SEQ ID NO: 4868 - protein, 43 aa, Artificial Sequence
  Description of Artificial Sequence: Synthetic antibody
TLYLQMNSLKTEDTAVYYCTTDAWDIVVVPAAMHAHFDYWGQG

SEQ ID NO: 4869 - DNA, 129 bp, Artificial Sequence
  Description of Artificial Sequence: Synthetic antibody
aagctgtatctgcgaatgaacagcctgaaaaccgaggacacagccgtgtattactgtaccacagatgcttgggatattgtagtagtaccagctgctatgcatgctcattttgactactggggccaggga

SEQ ID NO: 4870 - protein, 43 aa, Artificial Sequence
  Description of Artificial Sequence: Synthetic antibody
KLYLRMNSLKTEDTAVYYCTTDAWDIVVVPAAMHAHFDYWGQG

SEQ ID NO: 4871 - protein, 11 aa, Artificial Sequence
  Description of Artificial Sequence: Synthetic antibody
CVVIGVQEGYW

SEQ ID NO: 4872 - DNA, 129 bp, Artificial Sequence
  Description of Artificial Sequence: Synthetic antibody
tggttcaccatctccagatatgattcaaagaccacggcgtatctgcaaatgaacagcctgaaacccgaggacacggccgtgtattactgtgtggtaataggggtgcaagaaggctactggggccaggga

SEQ ID NO: 4873 - protein, 43 aa, Artificial Sequence
  Description of Artificial Sequence: Synthetic antibody
WFTISRYDSKTTAYLQMNSLKPEDTAVYYCVVIGVQEGYWGQG

SEQ ID NO: 4874 - DNA, 129 bp, Artificial Sequence
  Description of Artificial Sequence: Synthetic antibody
tggttcaccatctccagatatgattcaaagaccacggcgtatctgcaaatgaacagcctgaaaaccgaggacacggccgtgtattactgtgtggtaataggggtgcaagaaggctactggggccaggga

SEQ ID NO: 4875 - protein, 43 aa, Artificial Sequence
  Description of Artificial Sequence: Synthetic antibody
WFTISRYDSKTTAYLQMNSLKTEDTAVYYCVVIGVQEGYWGQG

SEQ ID NO: 4876 - DNA, 129 bp, Artificial Sequence
  Description of Artificial Sequence: Synthetic antibody
aggttcaccatctccagagatgattcaaagaccacggcgtatctgcaaatgaacagcctgaaaaccgaggacacggccgtgtattactgtgtggtaataggggtgcaagaaggctactggggccaggga

SEQ ID NO: 4877 - protein, 43 aa, Artificial Sequence
  Description of Artificial Sequence: Synthetic antibody
RFTISRDDSKTTAYLQMNSLKTEDTAVYYCVVIGVQEGYWGQG

SEQ ID NO: 4878 - protein, 21 aa, Artificial Sequence
  Description of Artificial Sequence: Synthetic antibody
CARDDSRSAFGELLSGLMDVW

SEQ ID NO: 4879 - DNA, 129 bp, Artificial Sequence
  Description of Artificial Sequence: Synthetic antibody
tgcagagtctacttggagctgagcagcctgagatctgaagacacggccgtgtattattgtgcgagagatgattctcgatcggcgttcggggagttattatcgggcctgatggacgtctggggccaaggg

SEQ ID NO: 4880 - protein, 43 aa, Artificial Sequence
  Description of Artificial Sequence: Synthetic antibody
CRVYLELSSLRSEDTAVYYCARDDSRSAFGELLSGLMDVWGQG

SEQ ID NO: 4881 - DNA, 129 bp, Artificial Sequence
  Description of Artificial Sequence: Synthetic antibody
tgcagagtctacatggagctgagcagcctgagatctgaagacacggccgtgtattattgtgcgagagatgattctcgatcggcgttcggggagttattatcgggcctgatggacgtctggggccaaggg

SEQ ID NO: 4882 - protein, 43 aa, Artificial Sequence
  Description of Artificial Sequence: Synthetic antibody
CRVYMELSSLRSEDTAVYYCARDDSRSAFGELLSGLMDVWGQG

SEQ ID NO: 4883 - DNA, 129 bp, Artificial Sequence
  Description of Artificial Sequence: Synthetic antibody
agcagagtctacatggagctgagcagcctgagatctgaagacacggccgtgtattattgtgcgagagatgattctcgatcggcgttcggggagttattatcgggcctgatggacgtctggggccaaggg

SEQ ID NO: 4884 - protein, 43 aa, Artificial Sequence
  Description of Artificial Sequence: Synthetic antibody
SRVYMELSSLRSEDTAVYYCARDDSRSAFGELLSGLMDVWGQG

SEQ ID NO: 4885 - protein, 21 aa, Artificial Sequence
  Description of Artificial Sequence: Synthetic antibody
CARVSLGTPELGGVEGPFDYW

SEQ ID NO: 4886 - DNA, 129 bp, Artificial Sequence
  Description of Artificial Sequence: Synthetic antibody
tgcacagcctacttggagctgagcagcctgagatctgaagacacggctgtgtattactgtgcgagagtttccctagggaccccggagctgggtggggtggaggggccttttgactactggggccaggga

SEQ ID NO: 4887 - protein, 43 aa, Artificial Sequence
  Description of Artificial Sequence: Synthetic antibody
CTAYLELSSLRSEDTAVYYCARVSLGTPELGGVEGPFDYWGQG

SEQ ID NO: 4888 - DNA, 129 bp, Artificial Sequence
  Description of Artificial Sequence: Synthetic antibody
tgcacagcctacatggagctgagcagcctgagatctgaagacacggctgtgtattactgtgcgagagtttccctagggaccccggagctgggtggggtggaggggccttttgactactggggccaggga

SEQ ID NO: 4889 - protein, 43 aa, Artificial Sequence
  Description of Artificial Sequence: Synthetic antibody
CTAYMELSSLRSEDTAVYYCARVSLGTPELGGVEGPFDYWGQG

SEQ ID NO: 4890 - DNA, 129 bp, Artificial Sequence
  Description of Artificial Sequence: Synthetic antibody
agcacagcctacatggagctgagcagcctgagatctgaagacacggctgtgtattactgtgcgagagtttccctagggaccccggagctgggtggggtggaggggccttttgactactggggccaggga

SEQ ID NO: 4891 - protein, 43 aa, Artificial Sequence
  Description of Artificial Sequence: Synthetic antibody
STAYMELSSLRSEDTAVYYCARVSLGTPELGGVEGPFDYWGQG

SEQ ID NO: 4892 - protein, 27 aa, Artificial Sequence
  Description of Artificial Sequence: Synthetic antibody
CAKDKYYSSSWYGRPPTTNEAGGMDVW

SEQ ID NO: 4893 - DNA, 129 bp, Artificial Sequence
  Description of Artificial Sequence: Synthetic antibody
ttgaacagcctgagagccgaggacacggccgtatattactgtgcgaaagacaagtactatagcagcagctggtacggacgaccgccgacgactaacgaggcggggggtatggacgtctggggccaaggg

SEQ ID NO: 4894 - protein, 43 aa, Artificial Sequence
  Description of Artificial Sequence: Synthetic antibody
LNSLRAEDTAVYYCAKDKYYSSSWYGRPPTTNEAGGMDVWGQG

SEQ ID NO: 4895 - DNA, 129 bp, Artificial Sequence
  Description of Artificial Sequence: Synthetic antibody
ttcaacagcctgagagccgaggacacggccgtatattactgtgcgaaagacaagtactatagcagcagctggtacggacgaccgccgacgactaacgaggcggggggtatggacgtctggggccaaggg

SEQ ID NO: 4896 - protein, 43 aa, Artificial Sequence
  Description of Artificial Sequence: Synthetic antibody
FNSLRAEDTAVYYCAKDKYYSSSWYGRPPTTNEAGGMDVWGQG

SEQ ID NO: 4897 - DNA, 129 bp, Artificial Sequence
  Description of Artificial Sequence: Synthetic antibody
atgaacagcctgagagccgaggacacggccgtatattactgtgcgaaagacaagtactatagcagcagctggtacggacgaccgccgacgactaacgaggcggggggtatggacgtctggggccaaggg

SEQ ID NO: 4898 - protein, 43 aa, Artificial Sequence
  Description of Artificial Sequence: Synthetic antibody
MNSLRAEDTAVYYCAKDKYYSSSWYGRPPTTNEAGGMDVWGQG

SEQ ID NO: 4899 - protein, 15 aa, Artificial Sequence
  Description of Artificial Sequence: Synthetic antibody
CITTYGYSGYDHGYW

SEQ ID NO: 4900 - DNA, 129 bp, Artificial Sequence
  Description of Artificial Sequence: Synthetic antibody
tcaagagatgattcaagaaccactgtctatctgcaaatgaacagcctgaaaagcgaggacacaggcgtctattactgtatcacgacgtatggatatagtggctacgatcatggctactggggccaggga

SEQ ID NO: 4901 - protein, 43 aa, Artificial Sequence
  Description of Artificial Sequence: Synthetic antibody
SRDDSRTTVYLQMNSLKSEDTGVYYCITTYGYSGYDHGYWGQG

SEQ ID NO: 4902 - DNA, 129 bp, Artificial Sequence
  Description of Artificial Sequence: Synthetic antibody
tcaagagatgattcaaaaaacacgctgtatctgcaaatgaacagcctgaaaagcgaggacacaggcgtctattactgtatcacgacgtatggatatagtggctacgatcatggctactggggccaggga

SEQ ID NO: 4903 - protein, 43 aa, Artificial Sequence
  Description of Artificial Sequence: Synthetic antibody
SRDDSKNTLYLQMNSLKSEDTGVYYCITTYGYSGYDHGYWGQG

SEQ ID NO: 4904 - DNA, 129 bp, Artificial Sequence
  Description of Artificial Sequence: Synthetic antibody
tcaagagatgattcaaaaaacacgctgtatctgcaaatgaacagcctgaaaaccgaggacacagccgtgtattactgtatcacgacgtatggatatagtggctacgatcatggctactggggccaggga

SEQ ID NO: 4905 - protein, 43 aa, Artificial Sequence
  Description of Artificial Sequence: Synthetic antibody
SRDDSKNTLYLQMNSLKTEDTAVYYCITTYGYSGYDHGYWGQG

SEQ ID NO: 4906 - protein, 19 aa, Artificial Sequence
  Description of Artificial Sequence: Synthetic antibody
CARWGEANSGYDDHWFDPW

SEQ ID NO: 4907 - DNA, 129 bp, Artificial Sequence
  Description of Artificial Sequence: Synthetic antibody
tccatcggcaccgcctacctgcagtggagcagcctgaaggcctcggacaccgccatgtattactgtgcgagatggggggaggcaaatagcggctacgatgatcactggttcgacccctggggccaggga

SEQ ID NO: 4908 - protein, 43 aa, Artificial Sequence
  Description of Artificial Sequence: Synthetic antibody
SIGTAYLQWSSLKASDTAMYYCARWGEANSGYDDHWFDPWGQG

SEQ ID NO: 4909 - DNA, 129 bp, Artificial Sequence
  Description of Artificial Sequence: Synthetic antibody
tccatcagcaccgcctacctgcagtggggcagcctgaaggcctcggacaccgccatgtattactgtgcgagatggggggaggcaaatagtggctacgatgatcactggtttgacccctggggccaggga

SEQ ID NO: 4910 - protein, 43 aa, Artificial Sequence
  Description of Artificial Sequence: Synthetic antibody
SISTAYLQWGSLKASDTAMYYCARWGEANSGYDDHWFDPWGQG

SEQ ID NO: 4911 - DNA, 129 bp, Artificial Sequence
  Description of Artificial Sequence: Synthetic antibody
tccatcagcaccgcctacctgcagtggagcagcctgaaggcctcggacaccgccatgtattactgtgcgagatggggggaggcaaatagtggctacgatgatcactggttcgacccctggggccaggga

SEQ ID NO: 4912 - protein, 43 aa, Artificial Sequence
  Description of Artificial Sequence: Synthetic antibody
SISTAYLQWSSLKASDTAMYYCARWGEANSGYDDHWFDPWGQG

SEQ ID NO: 4913 - protein, 13 aa, Artificial Sequence
  Description of Artificial Sequence: Synthetic antibody
CTSLTLFGELVTW

SEQ ID NO: 4914 - DNA, 129 bp, Artificial Sequence
  Description of Artificial Sequence: Synthetic antibody
accatctccatagatcattcaaagaacacggcgtatctgcaaatgaacagcctgaaaaccgaggacacggccgtgtattactgtactagtctaacactcttcggggagttagtaacttggggccaggga

SEQ ID NO: 4915 - protein, 43 aa, Artificial Sequence
  Description of Artificial Sequence: Synthetic antibody
TISIDHSKNTAYLQMNSLKTEDTAVYYCTSLTLFGELVTWGQG

SEQ ID NO: 4916 - DNA, 129 bp, Artificial Sequence
  Description of Artificial Sequence: Synthetic antibody
accatctccagagattattcaaagaacacggcgtatctgcaaatgaacagccttaaaaccgaggacacggccgtgtattactgtactagtctaacactcttcggggagttagtaacttggggccaggga

SEQ ID NO: 4917 - protein, 43 aa, Artificial Sequence
  Description of Artificial Sequence: Synthetic antibody
TISRDYSKNTAYLQMNSLKTEDTAVYYCTSLTLFGELVTWGQG

SEQ ID NO: 4918 - DNA, 129 bp, Artificial Sequence
  Description of Artificial Sequence: Synthetic antibody
accatctccagagatgattcaaagaacacggcgtatctgcaaatgaacagcctgaaaaccgaggacacggccgtgtattactgtactagtctaacactcttcggggagttagtaacttggggccaggga

SEQ ID NO: 4919 - protein, 43 aa, Artificial Sequence
  Description of Artificial Sequence: Synthetic antibody
TISRDDSKNTAYLQMNSLKTEDTAVYYCTSLTLFGELVTWGQG

SEQ ID NO: 4920 - protein, 22 aa, Artificial Sequence
  Description of Artificial Sequence: Synthetic antibody
CVKDGPRAPRNLGRYGGYFDDW

SEQ ID NO: 4921 - DNA, 129 bp, Artificial Sequence
  Description of Artificial Sequence: Synthetic antibody
tcgatctatctgaacatgaacaacctgagagtcgacgatacggccgtatatttctgtgtgaaagatggccctcgcgcgccccggaatctagggagatacggagggtactttgacgactggggccaggga

SEQ ID NO: 4922 - protein, 43 aa, Artificial Sequence
  Description of Artificial Sequence: Synthetic antibody
SIYLNMNNLRVDDTAVYFCVKDGPRAPRNLGRYGGYFDDWGQG

SEQ ID NO: 4923 - DNA, 129 bp, Artificial Sequence
  Description of Artificial Sequence: Synthetic antibody
acgctctatctgaacatgaacaacctgagagtcgacgatacggccgtatatttctgtgtgaaagatggccctcgcgcgccccggaatctagggagatacggagggtactttgacgactggggccaggga

SEQ ID NO: 4924 - protein, 43 aa, Artificial Sequence
  Description of Artificial Sequence: Synthetic antibody
TLYLNMNNLRVDDTAVYFCVKDGPRAPRNLGRYGGYFDDWGQG

SEQ ID NO: 4925 - DNA, 129 bp, Artificial Sequence
  Description of Artificial Sequence: Synthetic antibody
acgctctatctgaacatcaacaacctgagagtcgacgatacggccgtatatttctgtgtgaaagatggccctcgcgcgccccggaatctagggagatacggagggtactttgacgactggggccaggga

SEQ ID NO: 4926 - protein, 43 aa, Artificial Sequence
  Description of Artificial Sequence: Synthetic antibody
TLYLNINNLRVDDTAVYFCVKDGPRAPRNLGRYGGYFDDWGQG

SEQ ID NO: 4927 - protein, 16 aa, Artificial Sequence
  Description of Artificial Sequence: Synthetic antibody
CAHRGAAGTFNWFDPW

SEQ ID NO: 4928 - DNA, 129 bp, Artificial Sequence
  Description of Artificial Sequence: Synthetic antibody
caaggacacctccaaaaccaggtggtccttacaatgaccaacatggaccctgtggacacagccacatattactgtgcacacagaggagcagctggtaccttcaactggttcgacccctggggccaggga

SEQ ID NO: 4929 - protein, 43 aa, Artificial Sequence
  Description of Artificial Sequence: Synthetic antibody
QGHLQNQVVLTMTNMDPVDTATYYCAHRGAAGTFNWFDPWGQG

SEQ ID NO: 4930 - DNA, 129 bp, Artificial Sequence
  Description of Artificial Sequence: Synthetic antibody
caaggacacctccaaaaaccaggtggtcctacaatgaccaacatggaccctgtggacacagccacatattactgtgcacacagaggagcagctggtaccttcaactggttcgacccctggggccaggga

SEQ ID NO: 4931 - protein, 43 aa, Artificial Sequence
  Description of Artificial Sequence: Synthetic antibody
QGHLQKPGGPTMTNMDPVDTATYYCAHRGAAGTFNWFDPWGQG

SEQ ID NO: 4932 - DNA, 129 bp, Artificial Sequence
  Description of Artificial Sequence: Synthetic antibody
aaggacacctccaaaaaccaggtggtccttacaatgaccaacatggaccctgtggacacagccacatattactgtgcacacagaggagcagctggtaccttcaactggttcgacccctggggccaggga

SEQ ID NO: 4933 - protein, 43 aa, Artificial Sequence
  Description of Artificial Sequence: Synthetic antibody
KDTSKNQVVLTMTNMDPVDTATYYCAHRGAAGTFNWFDPWGQG

SEQ ID NO: 4934 - protein, 17 aa, Artificial Sequence
  Description of Artificial Sequence: Synthetic antibody
CAKSFGGYISYGDYDCW

SEQ ID NO: 4935 - DNA, 129 bp, Artificial Sequence
  Description of Artificial Sequence: Synthetic antibody
gtcaattccaaggacaccctgtatctgcaaatgaatagcctgagagccgaggacacggccgtatattactgtgcgaaatccttcggaggctatatttcctacggtgactacgattgctggggccaggga

SEQ ID NO: 4936 - protein, 43 aa, Artificial Sequence
  Description of Artificial Sequence: Synthetic antibody
VNSKDTLYLQMNSLRAEDTAVYYCAKSFGGYISYGDYDCWGQG

SEQ ID NO: 4937 - DNA, 129 bp, Artificial Sequence
  Description of Artificial Sequence: Synthetic antibody
gtcaattccaagaacaccctgtatctgcaaattaatagcctgagagccgagtacacggccgtatattactgtgcgaaatccttcggaggctatatttcctacggtgactacgattgctggggccaggga

SEQ ID NO: 4938 - protein, 43 aa, Artificial Sequence
  Description of Artificial Sequence: Synthetic antibody
VNSKNTLYLQINSLRAEYTAVYYCAKSFGGYISYGDYDCWGQG

SEQ ID NO: 4939 - DNA, 129 bp, Artificial Sequence
  Description of Artificial Sequence: Synthetic antibody
gtcaattccaagaacaccctgtatctgcaaatgaatagcctgagagccgaggacacggccgtatattactgtgcgaaatccttcggaggctatatttcctacggtgactacgattgctggggccaggga

SEQ ID NO: 4940 - protein, 43 aa, Artificial Sequence
  Description of Artificial Sequence: Synthetic antibody
VNSKNTLYLQMNSLRAEDTAVYYCAKSFGGYISYGDYDCWGQG

SEQ ID NO: 4941 - protein, 18 aa, Artificial Sequence
  Description of Artificial Sequence: Synthetic antibody
CAKGSRPGGQKGGYFDLW

SEQ ID NO: 4942 - DNA, 129 bp, Artificial Sequence
  Description of Artificial Sequence: Synthetic antibody
aattccaagaacacgctgtatctgcaaatgagcagcctgagagccgaggacccggtcgtatattactgtgcgaaagggtcacgtccaggtggacaaaagggggggtacttcgatctctggggccgtggc

SEQ ID NO: 4943 - protein, 43 aa, Artificial Sequence
  Description of Artificial Sequence: Synthetic antibody
NSKNTLYLQMSSLRAEDPVVYYCAKGSRPGGQKGGYFDLWGRG

SEQ ID NO: 4944 - DNA, 129 bp, Artificial Sequence
  Description of Artificial Sequence: Synthetic antibody
aattccaagaacacgctgtatctgcaaatgagcagcctgagagccgaggacacggtcgtatattactgtgcgaaagggtcacgtccaggtggacaaaagggggggtacttcgatctctggggccgtggc

SEQ ID NO: 4945 - protein, 43 aa, Artificial Sequence
  Description of Artificial Sequence: Synthetic antibody
NSKNTLYLQMSSLRAEDTVVYYCAKGSRPGGQKGGYFDLWGRG

SEQ ID NO: 4946 - DNA, 129 bp, Artificial Sequence
  Description of Artificial Sequence: Synthetic antibody
aattccaagaacacgctgtatctgcaaatgaacagcctgagagccgaggacacggccgtatattactgtgcgaaagggtcacgtccaggtggacaaaagggggggtacttcgatctctggggccgtggc

SEQ ID NO: 4947 - protein, 43 aa, Artificial Sequence
  Description of Artificial Sequence: Synthetic antibody
NSKNTLYLQMNSLRAEDTAVYYCAKGSRPGGQKGGYFDLWGRG

SEQ ID NO: 4948 - protein, 20 aa, Artificial Sequence
  Description of Artificial Sequence: Synthetic antibody
CARESGCSSTSCYFSWFDPW

SEQ ID NO: 4949 - DNA, 129 bp, Artificial Sequence
  Description of Artificial Sequence: Synthetic antibody
gtcagcacggcatatctgcagatcagcagcctaaaggctgaggacactgccgtgtattactgtgcgagagagagtggttgtagtagtaccagctgctattttagctggttcgacccctggggccaggga

SEQ ID NO: 4950 - protein, 43 aa, Artificial Sequence
  Description of Artificial Sequence: Synthetic antibody
VSTAYLQISSLKAEDTAVYYCARESGCSSTSCYFSWFDPWGQG

SEQ ID NO: 4951 - DNA, 129 bp, Artificial Sequence
  Description of Artificial Sequence: Synthetic antibody
gccagcacggcatatctgcagatcagcagcctaaaggctgaggacactgccgtgtattactgtgcgagagagagtggttgtagtagtaccagctgctattttagctggttcgacccctggggccaggga

SEQ ID NO: 4952 - protein, 43 aa, Artificial Sequence
  Description of Artificial Sequence: Synthetic antibody
ASTAYLQISSLKAEDTAVYYCARESGCSSTSCYFSWFDPWGQG

SEQ ID NO: 4953 - DNA, 129 bp, Artificial Sequence
  Description of Artificial Sequence: Synthetic antibody
gccagcacggcatatctgcagaccagcagcctaaaggctgaggacactgccgtgtattactgtgcgagagagagtggttgtagtagtaccagctgctattttagctggttcgacccctggggccaggga

SEQ ID NO: 4954 - protein, 43 aa, Artificial Sequence
  Description of Artificial Sequence: Synthetic antibody
ASTAYLQTSSLKAEDTAVYYCARESGCSSTSCYFSWFDPWGQG

SEQ ID NO: 4955 - protein, 22 aa, Artificial Sequence
  Description of Artificial Sequence: Synthetic antibody
CARGPGIVVVLSTYYYYGMDVW

SEQ ID NO: 4956 - DNA, 129 bp, Artificial Sequence
  Description of Artificial Sequence: Synthetic antibody
tcgatgtatctgcaaatgaacagcctgagagccgaggacacggccgtatattactgtgcgcgggggccggggatagtagtggttctttcgacctactactactacggtatggacgtctggggccaaggg

SEQ ID NO: 4957 - protein, 43 aa, Artificial Sequence
  Description of Artificial Sequence: Synthetic antibody
SMYLQMNSLRAEDTAVYYCARGPGIVVVLSTYYYYGMDVWGQG

SEQ ID NO: 4958 - DNA, 129 bp, Artificial Sequence
  Description of Artificial Sequence: Synthetic antibody
acgctgtatctgcaaatgaacagcctgagagccgaggacacggccgtatattactgtgcgcgggggccggggatagtagtggttctttcgacctactactactacggtatggacgtctggggccaaggg

SEQ ID NO: 4959 - protein, 43 aa, Artificial Sequence
  Description of Artificial Sequence: Synthetic antibody
TLYLQMNSLRAEDTAVYYCARGPGIVVVLSTYYYYGMDVWGQG

SEQ ID NO: 4960 - DNA, 129 bp, Artificial Sequence
  Description of Artificial Sequence: Synthetic antibody
acgatgtatctgcaaatgaacagcctgagagctgaggacacggccgtatattactgtgcgcgggggccggggatagtagtggttctttcgacctactactactacggtatggacgtctggggccaaggg

SEQ ID NO: 4961 - protein, 43 aa, Artificial Sequence
  Description of Artificial Sequence: Synthetic antibody
TMYLQMNSLRAEDTAVYYCARGPGIVVVLSTYYYYGMDVWGQG

SEQ ID NO: 4962 - protein, 19 aa, Artificial Sequence
  Description of Artificial Sequence: Synthetic antibody
CAKREDYDFWSGRGAFDIW

SEQ ID NO: 4963 - DNA, 129 bp, Artificial Sequence
  Description of Artificial Sequence: Synthetic antibody
tccaataactcgctgtatctgcaaatgaacagcctgagagccgaggacacggccgtatattactgtgcgaaaagggaggattacgatttttggagtggccggggtgcttttgatatctggggccaaggg

SEQ ID NO: 4964 - protein, 43 aa, Artificial Sequence
  Description of Artificial Sequence: Synthetic antibody
SNNSLYLQMNSLRAEDTAVYYCAKREDYDFWSGRGAFDIWGQG

SEQ ID NO: 4965 - DNA, 129 bp, Artificial Sequence
  Description of Artificial Sequence: Synthetic antibody
tccaagaactcgctgtatctgcaaatgaacagcctgagagccgaggacacggccgtatattactgtgcgaaaagggaggattacgatttttggagtggccggggtgcttttgatatctggggccaaggg

SEQ ID NO: 4966 - protein, 43 aa, Artificial Sequence
  Description of Artificial Sequence: Synthetic antibody
SKNSLYLQMNSLRAEDTAVYYCAKREDYDFWSGRGAFDIWGQG

SEQ ID NO: 4967 - DNA, 129 bp, Artificial Sequence
  Description of Artificial Sequence: Synthetic antibody
tccaagaacacgctgtatctgcaaatgaacagcctgagagccgaggacacggccgtatattactgtgcgaaaagggaggattacgatttttggagtggccggggtgcttttgatatctggggccaaggg

SEQ ID NO: 4968 - protein, 43 aa, Artificial Sequence
  Description of Artificial Sequence: Synthetic antibody
SKNTLYLQMNSLRAEDTAVYYCAKREDYDFWSGRGAFDIWGQG

SEQ ID NO: 4969 - protein, 21 aa, Artificial Sequence
  Description of Artificial Sequence: Synthetic antibody
CAREGAYGDYRGYYYYGMDVW

SEQ ID NO: 4970 - DNA, 129 bp, Artificial Sequence
  Description of Artificial Sequence: Synthetic antibody
tgcactgcctacatggagctgaggagcctgagatctgacgacacggccgtgtattactgtgcgagagagggggcttacggtgactatcgtggctactactactacggtatggacgtctggggccaaggg

SEQ ID NO: 4971 - protein, 43 aa, Artificial Sequence
  Description of Artificial Sequence: Synthetic antibody
CTAYMELRSLRSDDTAVYYCAREGAYGDYRGYYYYGMDVWGQG

SEQ ID NO: 4972 - DNA, 129 bp, Artificial Sequence
  Description of Artificial Sequence: Synthetic antibody
tgcacagcctacttggagctgaggagcctgagatctgacgacacggccgtgtattactgtgcgagagagggggcttacggtgactatcgtggctactactactacggtatggacgtctggggccaaggg

SEQ ID NO: 4973 - protein, 43 aa, Artificial Sequence
  Description of Artificial Sequence: Synthetic antibody
CTAYLELRSLRSDDTAVYYCAREGAYGDYRGYYYYGMDVWGQG

SEQ ID NO: 4974 - DNA, 129 bp, Artificial Sequence
  Description of Artificial Sequence: Synthetic antibody
agcacagcctacatggagctgaggagcctgagatctgacgacacggccgtgtattactgtgcgagagagggggcttacggtgactatcgtggctactactactacggtatggacgtctggggccaaggg

SEQ ID NO: 4975 - protein, 43 aa, Artificial Sequence
  Description of Artificial Sequence: Synthetic antibody
STAYMELRSLRSDDTAVYYCAREGAYGDYRGYYYYGMDVWGQG

SEQ ID NO: 4976 - protein, 20 aa, Artificial Sequence
  Description of Artificial Sequence: Synthetic antibody
CATTPGPWIQLWFGGGFDYW

SEQ ID NO: 4977 - DNA, 129 bp, Artificial Sequence
  Description of Artificial Sequence: Synthetic antibody
atcaccaccgcctacctacagtggagcagcctgcaggcctcggacaccgccatttattactgtgcgacaacccccgggccgtggatacaactttggtttggggggggctttgactactggggccaggga

SEQ ID NO: 4978 - protein, 43 aa, Artificial Sequence
  Description of Artificial Sequence: Synthetic antibody
ITTAYLQWSSLQASDTAIYYCATTPGPWIQLWFGGGFDYWGQG

SEQ ID NO: 4979 - DNA, 129 bp, Artificial Sequence
  Description of Artificial Sequence: Synthetic antibody
atcaccaccgcctacctacagtggagcagcctgcaggcctcggacaccgccatgtattactgtgcgacaacccccgggccgtggatacaactttggtttggggggggctttgactactggggccaggga

SEQ ID NO: 4980 - protein, 43 aa, Artificial Sequence
  Description of Artificial Sequence: Synthetic antibody
ITTAYLQWSSLQASDTAMYYCATTPGPWIQLWFGGGFDYWGQG

SEQ ID NO: 4981 - DNA, 129 bp, Artificial Sequence
  Description of Artificial Sequence: Synthetic antibody
atcaccaccgcctacctacagtggagcagcctgcaggcctcggacaccgccatgtattactgtgcgacaacacccgggccgtggatacaactttggtttggggggggctttgactactggggccaggga

SEQ ID NO: 4982 - protein, 15 aa, Artificial Sequence
  Description of Artificial Sequence: Synthetic antibody
CATSVLPYHLHFDYW

SEQ ID NO: 4983 - DNA, 129 bp, Artificial Sequence
  Description of Artificial Sequence: Synthetic antibody
tccagaaacaattccaagaacacgctgtatcttcaaatgaacagcctgagagccgaggacacggccgtgtattactgtgcgacgtcagttctgccttaccatctccactttgactactggggccaggga

SEQ ID NO: 4984 - protein, 43 aa, Artificial Sequence
  Description of Artificial Sequence: Synthetic antibody
SRNNSKNTLYLQMNSLRAEDTAVYYCATSVLPYHLHFDYWGQG

SEQ ID NO: 4985 - DNA, 129 bp, Artificial Sequence
  Description of Artificial Sequence: Synthetic antibody
tccacaaacaattccaacaacacgctgtatcttcaaatgaacagcctgagagccgaggacacggccgtgtattactgtgcgacgtcagttctgccttaccatctccactttgactactggggccaggga

SEQ ID NO: 4986 - protein, 43 aa, Artificial Sequence
  Description of Artificial Sequence: Synthetic antibody
STNNSNNTLYLQMNSLRAEDTAVYYCATSVLPYHLHFDYWGQG

SEQ ID NO: 4987 - DNA, 129 bp, Artificial Sequence
  Description of Artificial Sequence: Synthetic antibody
tacagaaacaattccaagaacacgctgtatcttaaaatgaacagcctgagagccgaggacacggccgtgtattactgtgcgacgtcagttctgccttaccatctccactttgactactggggccaggga

SEQ ID NO: 4988 - protein, 43 aa, Artificial Sequence
  Description of Artificial Sequence: Synthetic antibody
YRNNSKNTLYLKMNSLRAEDTAVYYCATSVLPYHLHFDYWGQG

SEQ ID NO: 4989 - protein, 14 aa, Artificial Sequence
  Description of Artificial Sequence: Synthetic antibody
CARVRLGIAAAQTW

SEQ ID NO: 4990 - DNA, 129 bp, Artificial Sequence
  Description of Artificial Sequence: Synthetic antibody
atatcagtaggcatgtccaagaaccagttctccctgaagctgagctctgtgaccgccgcggacacggctgtgtattactgtgcgagagtccgcctcggtatagcggcagcccaaacctggggccaggga

SEQ ID NO: 4991 - protein, 43 aa, Artificial Sequence
  Description of Artificial Sequence: Synthetic antibody
ISVGMSKNQFSLKLSSVTAADTAVYYCARVRLGIAAAQTWGQG

SEQ ID NO: 4992 - DNA, 129 bp, Artificial Sequence
  Description of Artificial Sequence: Synthetic antibody
atatcagtaggcacgtccaagaaccagttctccctgaagctgagctctgtgaccgccgcggacacggctgtgtattactgtgcgagagtccgcctcggtatagcggcagcccaaacctggggccaggga

SEQ ID NO: 4993 - protein, 43 aa, Artificial Sequence
  Description of Artificial Sequence: Synthetic antibody
ISVGTSKNQFSLKLSSVTAADTAVYYCARVRLGIAAAQTWGQG

SEQ ID NO: 4994 - DNA, 129 bp, Artificial Sequence
  Description of Artificial Sequence: Synthetic antibody
atatcagtagacacgtccaagaaccagttctccctgaagctgagctctgtgaccgccgcggacacggctgtgtattactgtgcgagagtccgcctcggtatagcagcagcccaaacctggggccaggga

SEQ ID NO: 4995 - protein, 43 aa, Artificial Sequence
  Description of Artificial Sequence: Synthetic antibody
ISVDTSKNQFSLKLSSVTAADTAVYYCARVRLGIAAAQTWGQG

SEQ ID NO: 4996 - protein, 16 aa, Artificial Sequence
  Description of Artificial Sequence: Synthetic antibody
CTKSISTGGTTAFDIW

SEQ ID NO: 4997 - DNA, 129 bp, Artificial Sequence
  Description of Artificial Sequence: Synthetic antibody
agaggcaacgccaagagcacactgtatctgcaaatgaacactctgagagccgaggacacggctatatattactgtacaaaaagtatatcaacaggtggaaccaccgcttttgatatctggggccaaggg

SEQ ID NO: 4998 - protein, 43 aa, Artificial Sequence
  Description of Artificial Sequence: Synthetic antibody
RGNAKSTLYLQMNTLRAEDTAIYYCTKSISTGGTTAFDIWGQG

SEQ ID NO: 4999 - DNA, 129 bp, Artificial Sequence
  Description of Artificial Sequence: Synthetic antibody
agagacaacgccaagagcacactgtatctgcaaatgaacactctgagggccgaggacacggctatatattactgtacaaaaagtatatcaacaggtggaaccaccgcttttgatatctggggccaaggg

SEQ ID NO: 5000 - protein, 43 aa, Artificial Sequence
  Description of Artificial Sequence: Synthetic antibody
RDNAKSTLYLQMNTLRAEDTAIYYCTKSISTGGTTAFDIWGQG

SEQ ID NO: 5001 - DNA, 129 bp, Artificial Sequence
  Description of Artificial Sequence: Synthetic antibody
agagacaacgccaagagcacactgtatctgcaaatgaacactctgagagccgaggacacggctatatattactgtacaaaaagtatatcaacaggtggaaccaccgcttttgatatctggggccaaggg

SEQ ID NO: 5002 - protein, 7 aa, Artificial Sequence
  Description of Artificial Sequence: Synthetic antibody
CARTRYW

SEQ ID NO: 5003 - DNA, 129 bp, Artificial Sequence
  Description of Artificial Sequence: Synthetic antibody
atctctgaagaccaggctcaccatctccaaggccacctccaaaaccaggtggtccttacaatgaccaacatggaccctgtggacacagccacgtattactgtgcacggacccggtactggggccaggga

SEQ ID NO: 5004 - protein, 43 aa, Artificial Sequence
  Description of Artificial Sequence: Synthetic antibody
ISEDQAHHLQGHLQNQVVLTMTNMDPVDTATYYCARTRYWGQG

SEQ ID NO: 5005 - DNA, 129 bp, Artificial Sequence
  Description of Artificial Sequence: Synthetic antibody
tctctgaagaccaggctcaccatctccaaggccacctccaaaaaccgggtggcccttacaatgaccaacatggaccctgtggacacagccacgtattactgtgcacggacccggtactggggccaggga

SEQ ID NO: 5006 - protein, 43 aa, Artificial Sequence
  Description of Artificial Sequence: Synthetic antibody
SLKTRLTISKATSKNRVALTMTNMDPVDTATYYCARTRYWGQG

SEQ ID NO: 5007 - DNA, 129 bp, Artificial Sequence
  Description of Artificial Sequence: Synthetic antibody
tctctgaagaccaggctcaccatctccaaggccacctccaaaaaccaggtggtccttacaatgaccaacatggaccctgtggacacagccacgtattactgtgcacggacccggtactggggccaggga

SEQ ID NO: 5008 - protein, 43 aa, Artificial Sequence
  Description of Artificial Sequence: Synthetic antibody
SLKTRLTISKATSKNQVVLTMTNMDPVDTATYYCARTRYWGQG

SEQ ID NO: 5009 - protein, 14 aa, Artificial Sequence
  Description of Artificial Sequence: Synthetic antibody
CVRGDWAYWYFDLW

SEQ ID NO: 5010 - DNA, 129 bp, Artificial Sequence
  Description of Artificial Sequence: Synthetic antibody
ttctccagagacaaccccaagaacacgctgtatctgcaaatgaacagtctgagagccgaggacacggctgtgtattattgtgtaagaggggactgggcctactggtacttcgatctctggggccgtggc

SEQ ID NO: 5011 - protein, 43 aa, Artificial Sequence
  Description of Artificial Sequence: Synthetic antibody
FSRDNPKNTLYLQMNSLRAEDTAVYYCVRGDWAYWYFDLWGRG

SEQ ID NO: 5012 - DNA, 129 bp, Artificial Sequence
  Description of Artificial Sequence: Synthetic antibody
atctccagagacaacgccaagaacacgctgtatctgcaaatgaacagtctgagagccgaggacacggctgtgtattattgtgtaagaggggactgggcctactggtacttcgatctctggggccgtggc

SEQ ID NO: 5013 - protein, 43 aa, Artificial Sequence
  Description of Artificial Sequence: Synthetic antibody
ISRDNAKNTLYLQMNSLRAEDTAVYYCVRGDWAYWYFDLWGRG

SEQ ID NO: 5014 - DNA, 129 bp, Artificial Sequence
  Description of Artificial Sequence: Synthetic antibody
atctccagacacaaccccaagaacacgctgtatctgcaaatgaacagtctgagagccgaggacacggctgtgtattattgtgtaagaggggactgggcctactggtacttcgatctctggggccgtggc

SEQ ID NO: 5015 - protein, 43 aa, Artificial Sequence
  Description of Artificial Sequence: Synthetic antibody
ISRHNPKNTLYLQMNSLRAEDTAVYYCVRGDWAYWYFDLWGRG

SEQ ID NO: 5016 - protein, 14 aa, Artificial Sequence
  Description of Artificial Sequence: Synthetic antibody
CATNPGSYVYFVYW

SEQ ID NO: 5017 - DNA, 129 bp, Artificial Sequence
  Description of Artificial Sequence: Synthetic antibody
atctccagggacaacgccaagaactccctgtatctgcaaatcaacagcctgagagccgaggacacggccctatattactgtgcgacgaatcctgggagctatgtttattttgtctactggggccaggga

SEQ ID NO: 5018 - protein, 43 aa, Artificial Sequence
  Description of Artificial Sequence: Synthetic antibody
ISRDNAKNSLYLQINSLRAEDTALYYCATNPGSYVYFVYWGQG

SEQ ID NO: 5019 - DNA, 129 bp, Artificial Sequence
  Description of Artificial Sequence: Synthetic antibody
atctccagggacaacgccaagaactccctgtatctgcaaatcaacagcctgagagccgacgacacggccgtgtattactgtgcgacgaatcctgggagctacgtctattttgtctactggggccaggga

SEQ ID NO: 5020 - protein, 43 aa, Artificial Sequence
  Description of Artificial Sequence: Synthetic antibody
ISRDNAKNSLYLQINSLRADDTAVYYCATNPGSYVYFVYWGQG

SEQ ID NO: 5021 - DNA, 129 bp, Artificial Sequence
  Description of Artificial Sequence: Synthetic antibody
atctccaggcacaacgccaacaactccctgtatctgcaaatcaacagcctgagagccgaggacacggccctatattactgtgcgacgaatcctgggagctatgtttattttgtctactggggccaggga

SEQ ID NO: 5022 - protein, 43 aa, Artificial Sequence
  Description of Artificial Sequence: Synthetic antibody
ISRHNANNSLYLQINSLRAEDTALYYCATNPGSYVYFVYWGQG

SEQ ID NO: 5023 - protein, 15 aa, Artificial Sequence
  Description of Artificial Sequence: Synthetic antibody
CAKGDDEGYYGMDVW

SEQ ID NO: 5024 - DNA, 129 bp, Artificial Sequence
  Description of Artificial Sequence: Synthetic antibody
tccagagacaacgccaagaactccctgtatctgcaaatgaacagtctgagagctgaggacacggccttgtattactgtgcaaaaggggacgacgagggatactacggtatggacgtctggggccaaggg

SEQ ID NO: 5025 - protein, 43 aa, Artificial Sequence
  Description of Artificial Sequence: Synthetic antibody
SRDNAKNSLYLQMNSLRAEDTALYYCAKGDDEGYYGMDVWGQG

SEQ ID NO: 5026 - DNA, 129 bp, Artificial Sequence
  Description of Artificial Sequence: Synthetic antibody
tccagagacaaccccaacaactccctgtatctgcaaatgaacagtctgagagctgaggacacggccttgtattactgtgcaaaaggggacgacgagggatactacggtatggacgtctggggccaaggg

SEQ ID NO: 5027 - protein, 43 aa, Artificial Sequence
  Description of Artificial Sequence: Synthetic antibody
SRDNPNNSLYLQMNSLRAEDTALYYCAKGDDEGYYGMDVWGQG

SEQ ID NO: 5028 - DNA, 129 bp, Artificial Sequence
  Description of Artificial Sequence: Synthetic antibody
tccacagacaaccccaagaactccctgtatctgcaaatgaacagtctgagagctgaggacacggccttgtattactgtgcaaaaggggacgacgagggatactacggtatggacgtctggggccaaggg

SEQ ID NO: 5029 - protein, 43 aa, Artificial Sequence
  Description of Artificial Sequence: Synthetic antibody
STDNPKNSLYLQMNSLRAEDTALYYCAKGDDEGYYGMDVWGQG

SEQ ID NO: 5030 - protein, 13 aa, Artificial Sequence
  Description of Artificial Sequence: Synthetic antibody
CARRGPRGDNDYW

SEQ ID NO: 5031 - DNA, 129 bp, Artificial Sequence
  Description of Artificial Sequence: Synthetic antibody
accatgacctgggacaggtccacgagcactgtttacttggaggtcaacagcctcaaatctgacgactcggccgtatattattgtgcgagaaggggccctcggggtgacaatgactactggggccaggga

SEQ ID NO: 5032 - protein, 43 aa, Artificial Sequence
  Description of Artificial Sequence: Synthetic antibody
TMTWDRSTSTVYLEVNSLKSDDSAVYYCARRGPRGDNDYWGQG

SEQ ID NO: 5033 - DNA, 129 bp, Artificial Sequence
  Description of Artificial Sequence: Synthetic antibody
accatgaccagggacaggtccacgagcactgtttacttggaggtgaacagcctcaaatctgacgactcggccgtatattattgtgcgagaaggggccctcggggtgacaatgactactggggccaggga

SEQ ID NO: 5034 - protein, 43 aa, Artificial Sequence
  Description of Artificial Sequence: Synthetic antibody
TMTRDRSTSTVYLEVNSLKSDDSAVYYCARRGPRGDNDYWGQG

SEQ ID NO: 5035 - DNA, 129 bp, Artificial Sequence
  Description of Artificial Sequence: Synthetic antibody
accatgaccagggacaggtccacgagcactgtttacttggaggtcaacagcctcaaatctgacgactcggccgtatattattgtgcgagaaggggccctcggggtgacaatgactactggggccaggga

SEQ ID NO: 5036 - protein, 13 aa, Artificial Sequence [sequence omitted]

SEQ ID NO: 5037 - DNA, 129 bp, Artificial Sequence
  Description of Artificial Sequence: Synthetic antibody
caccatctccagagaaatgccaagaactccttgtatcttcaaatgaacagcctgagagccggggacacggctgtgtattactgtgcaagaggtgactactactacggtatggacgtctggggccaaggg

SEQ ID NO: 5038 - protein, 43 aa, Artificial Sequence
  Description of Artificial Sequence: Synthetic antibody
HHLQRNAKNSLYLQMNSLRAGDTAVYYCARGDYYYGMDVWGQG

SEQ ID NO: 5039 - DNA, 129 bp, Artificial Sequence
  Description of Artificial Sequence: Synthetic antibody
accatctccagagaaaatgccaagaactccttgtatcttcaaatgaacagcctgagagccggggacacggctgtgtattactgtgcaagaggtgactactactacggtatggacgtctggggccaaggg

SEQ ID NO: 5040 - protein, 43 aa, Artificial Sequence
  Description of Artificial Sequence: Synthetic antibody
TISRENAKNSLYLQMNSLRAGDTAVYYCARGDYYYGMDVWGQG

SEQ ID NO: 5041 - DNA, 129 bp, Artificial Sequence
  Description of Artificial Sequence: Synthetic antibody
aacatctccatagaaaatgccaagaactccttgtatcttcaaatgaacagcctgagagccggggacacggctgtgtattactgtgcaagaggtgactactactacggtatggacgtctggggccaaggg

SEQ ID NO: 5042 - protein, 43 aa, Artificial Sequence
  Description of Artificial Sequence: Synthetic antibody
NISIENAKNSLYLQMNSLRAGDTAVYYCARGDYYYGMDVWGQG

SEQ ID NO: 5043 - protein, 18 aa, Artificial Sequence
  Description of Artificial Sequence: Synthetic antibody
CAKDGGSSPEGHDAFDIW

SEQ ID NO: 5044 - DNA, 129 bp, Artificial Sequence
  Description of Artificial Sequence: Synthetic antibody
aacgccaagaactccctgtatctgcaaatgaacagtctgagagctgaggacacggccttgtattactgtgcaaaagatggcggcagttcacctgagggtcatgatgcttttgatatctggggccaaggg

SEQ ID NO: 5045 - protein, 43 aa, Artificial Sequence
  Description of Artificial Sequence: Synthetic antibody
NAKNSLYLQMNSLRAEDTALYYCAKDGGSSPEGHDAFDIWGQG

SEQ ID NO: 5046 - DNA, 129 bp, Artificial Sequence
  Description of Artificial Sequence: Synthetic antibody
aacgccaagaactccctgtatctgcaaatgaacagtctgagagctgaggacacggccttgtattactgtgcaaaagatggcggcagctcacctgagggtcatgatgcttttgatatctggggccaaggg

SEQ ID NO: 5047 - DNA, 129 bp, Artificial Sequence
  Description of Artificial Sequence: Synthetic antibody
aacgccaagaactccccgtatctgcaaatgaacagtctgagagctgaggacacggccttgtattactgtgcaaaagatggcggcagctcacctgagggtcatgatgcttttgatatctggggccaaggg

SEQ ID NO: 5048 - protein, 43 aa, Artificial Sequence
  Description of Artificial Sequence: Synthetic antibody
NAKNSPYLQMNSLRAEDTALYYCAKDGGSSPEGHDAFDIWGQG

SEQ ID NO: 5049 - protein, 23 aa, Artificial Sequence
  Description of Artificial Sequence: Synthetic antibody
CAKTRSDLIRYCSGGTCYFFDSW

SEQ ID NO: 5050 - DNA, 129 bp, Artificial Sequence
  Description of Artificial Sequence: Synthetic antibody
ctgtatctgcaaatgaacagcctgagagccgaagacgcggccgtatattactgtgcgaaaacacggagcgacctcatacgatattgtagtggtggtacctgctacttctttgactcctggggccaggga

SEQ ID NO: 5051 - protein, 43 aa, Artificial Sequence
  Description of Artificial Sequence: Synthetic antibody
LYLQMNSLRAEDAAVYYCAKTRSDLIRYCSGGTCYFFDSWGQG

SEQ ID NO: 5052 - DNA, 129 bp, Artificial Sequence
  Description of Artificial Sequence: Synthetic antibody
ctgtatctgcaaatcaacagcctgagagccgaagacgcggccgtatattactgtgcgaaaacacggagcgacctcatacgatattgtagtggtggtacctgctacttctttgactcctggggccaggga

SEQ ID NO: 5053 - protein, 43 aa, Artificial Sequence
  Description of Artificial Sequence: Synthetic antibody
LYLQINSLRAEDAAVYYCAKTRSDLIRYCSGGTCYFFDSWGQG

SEQ ID NO: 5054 - DNA, 129 bp, Artificial Sequence
  Description of Artificial Sequence: Synthetic antibody
atgtatctccaaatgaacagcctgagagccgaagacgcggccgtatattactgtgcgaaaacacggagcgacctcatacgatattgtagtggtggtacctgctacttctttgactcctggggccaggga

SEQ ID NO: 5055 - protein, 43 aa, Artificial Sequence
  Description of Artificial Sequence: Synthetic antibody
MYLQMNSLRAEDAAVYYCAKTRSDLIRYCSGGTCYFFDSWGQG

SEQ ID NO: 5056 - protein, 15 aa, Artificial Sequence
  Description of Artificial Sequence: Synthetic antibody
CTRRILGSPGGMDVW

SEQ ID NO: 5057 - DNA, 129 bp, Artificial Sequence
  Description of Artificial Sequence: Synthetic antibody
tccagagatgattcaaagaacacggcgtatctgcaaatgaacagcctgaaaaccgaggacacggccgtgtattactgtactagacgaatccttgggtccccgggcggtatggacgtctggggccaaggg

SEQ ID NO: 5058 - protein, 43 aa, Artificial Sequence
  Description of Artificial Sequence: Synthetic antibody
SRDDSKNTAYLQMNSLKTEDTAVYYCTRRILGSPGGMDVWGQG

SEQ ID NO: 5059 - DNA, 129 bp, Artificial Sequence
  Description of Artificial Sequence: Synthetic antibody
tccagagatcattcaaacaacacggcgtatctgcaaatgaacagcctgaaaaccgaggacacggccgtgtattactgtactagacgaatccttgggtccccgggcggtatggacgtctggggccaaggg

SEQ ID NO: 5060 - protein, 43 aa, Artificial Sequence
  Description of Artificial Sequence: Synthetic antibody
SRDHSNNTAYLQMNSLKTEDTAVYYCTRRILGSPGGMDVWGQG

SEQ ID NO: 5061 - DNA, 129 bp, Artificial Sequence
  Description of Artificial Sequence: Synthetic antibody
tccacagatgattcaaacaacacggcgtatctgcaaatgaacagcctgaaaaccgaggacacggccgtgtattactgtactagacgaatccttgggtccccgggcggtatggacgtctggggccaaggg

SEQ ID NO: 5062 - protein, 43 aa, Artificial Sequence
  Description of Artificial Sequence: Synthetic antibody
STDDSNNTAYLQMNSLKTEDTAVYYCTRRILGSPGGMDVWGQG

SEQ ID NO: 5063 - protein, 23 aa, Artificial Sequence
  Description of Artificial Sequence: Synthetic antibody
CARDAPTYYYHSSGYYFWHFDLW

SEQ ID NO: 5064 - DNA, 129 bp, Artificial Sequence
  Description of Artificial Sequence: Synthetic antibody
gtctatatggaactgaccagcctgacacttgacgacacggccgtctattactgtgcgagagatgcgccaacatattattatcatagcagtggttattatttctggcacttcgatctgtggggccgtggc

SEQ ID NO: 5065 - protein, 43 aa, Artificial Sequence
  Description of Artificial Sequence: Synthetic antibody
VYMELTSLTLDDTAVYYCARDAPTYYYHSSGYYFWHFDLWGRG

SEQ ID NO: 5066 - DNA, 129 bp, Artificial Sequence
  Description of Artificial Sequence: Synthetic antibody
gtctatatggaactgaccagcctgacacttgacgacacggccgtctattactgtgcgagagatgcgccaacatattattatcatagcagtggttattatttctggcacttcgatctctggggccgtggc

SEQ ID NO: 5067 - DNA, 129 bp, Artificial Sequence
  Description of Artificial Sequence: Synthetic antibody
gtctatatggaactgaccagcctgacacctgacgacacggccgtctattactgtgcgagagatgcgccaacatattattatcatagcagtggttattatttctggcacttcgatctctggggccgtggc

SEQ ID NO: 5068 - protein, 43 aa, Artificial Sequence
  Description of Artificial Sequence: Synthetic antibody
VYMELTSLTPDDTAVYYCARDAPTYYYHSSGYYFWHFDLWGRG

SEQ ID NO: 5069 - protein, 13 aa, Artificial Sequence
  Description of Artificial Sequence: Synthetic antibody
CGVWSGRNGMDLW

SEQ ID NO: 5070 - DNA, 129 bp, Artificial Sequence
  Description of Artificial Sequence: Synthetic antibody
accatgaccagggacacctccataaacacagcctacatggagctgagcagcctgaaatctgaggacacggccgtgtattactgtggcgtctggagtggccgaaacggtatggacctctggggccaaggg

SEQ ID NO: 5071 - protein, 43 aa, Artificial Sequence
  Description of Artificial Sequence: Synthetic antibody
TMTRDTSINTAYMELSSLKSEDTAVYYCGVWSGRNGMDLWGQG

SEQ ID NO: 5072 - DNA, 129 bp, Artificial Sequence
  Description of Artificial Sequence: Synthetic antibody
accatgaccaggcacacctccataaacacagcctacatggagctgagcagccttaaatctgaggacacggccgtgtattactgtggcgtctggagtggccgaaacggtatggacctctggggccaaggg

SEQ ID NO: 5073 - protein, 43 aa, Artificial Sequence
  Description of Artificial Sequence: Synthetic antibody
TMTRHTSINTAYMELSSLKSEDTAVYYCGVWSGRNGMDLWGQG

SEQ ID NO: 5074 - DNA, 129 bp, Artificial Sequence
  Description of Artificial Sequence: Synthetic antibody
accatgaccaggcacacctccataaacacagcctacatggagctgagcagcctgaaatctgaggacacggccgtgtattactgtggcgtctggagtggccgaaacggtatggacctctggggccaaggg

SEQ ID NO: 5075 - protein, 13 aa, Artificial Sequence
  Description of Artificial Sequence: Synthetic antibody
CARLGFWSGLDYW

SEQ ID NO: 5076 - DNA, 129 bp, Artificial Sequence
  Description of Artificial Sequence: Synthetic antibody
accatctcaagagatgattcaaagaactcactgtatctgcaaatgaacagcctgaaaaccgaggacacggccgtgtattactgtgctagacttgggttttggagtggtttggactactggggccaggga

SEQ ID NO: 5077 - protein, 43 aa, Artificial Sequence
  Description of Artificial Sequence: Synthetic antibody
TISRDDSKNSLYLQMNSLKTEDTAVYYCARLGFWSGLDYWGQG

SEQ ID NO: 5078 - DNA, 129 bp, Artificial Sequence
  Description of Artificial Sequence: Synthetic antibody
accatctcaagagatgattcaaagaactcactgtatctgcaaatgaacagcctgaaaaccgaggacacggccgcgtattactgtgctagacttgggttttggagtggtttggactactggggccaggga

SEQ ID NO: 5079 - protein, 43 aa, Artificial Sequence
  Description of Artificial Sequence: Synthetic antibody
TISRDDSKNSLYLQMNSLKTEDTAAYYCARLGFWSGLDYWGQG

SEQ ID NO: 5080 - DNA, 129 bp, Artificial Sequence
  Description of Artificial Sequence: Synthetic antibody
accatctcaagacattattcaaagaactcactgtatctgcaaatgaacagcctgaaaaccgaggacacggccgtgtattactgtgctagacttgggttttggagtggtttggactactggggccaggga

SEQ ID NO: 5081 - protein, 43 aa, Artificial Sequence
  Description of Artificial Sequence: Synthetic antibody
TISRHYSKNSLYLQMNSLKTEDTAVYYCARLGFWSGLDYWGQG

SEQ ID NO: 5082 - protein, 11 aa, Artificial Sequence
  Description of Artificial Sequence: Synthetic antibody
CTRHAGAIGYW

SEQ ID NO: 5083 - DNA, 129 bp, Artificial Sequence
  Description of Artificial Sequence: Synthetic antibody
tggttcaccatctccagagatgattcaaagaacacggcgtatctgcaaatgaacagcctgaaacccgaggacacggccgtgtattactgtactagacatgcgggggcgataggctactggggccaggga

SEQ ID NO: 5084 - protein, 43 aa, Artificial Sequence
  Description of Artificial Sequence: Synthetic antibody
WFTISRDDSKNTAYLQMNSLKPEDTAVYYCTRHAGAIGYWGQG

SEQ ID NO: 5085 - DNA, 129 bp, Artificial Sequence
  Description of Artificial Sequence: Synthetic antibody
tggttcaccatctccagagatgattcaaagaacacggcgtatctgcaaatgaacagcctgaaaaccgaggacacggccgtgtattactgtactagacatgcgggggcgataggctactggggccaggga

SEQ ID NO: 5086 - protein, 43 aa, Artificial Sequence
  Description of Artificial Sequence: Synthetic antibody
WFTISRDDSKNTAYLQMNSLKTEDTAVYYCTRHAGAIGYWGQG

SEQ ID NO: 5087 - DNA, 129 bp, Artificial Sequence
  Description of Artificial Sequence: Synthetic antibody
aggttcaccatctccagagatgattcaaagaacacggcgtatctgcaaatgaacagcctgaaaaccgaggacacggccgtgtattactgtactagacatgcgggggcgataggctactggggccaggga

SEQ ID NO: 5088 - protein, 43 aa, Artificial Sequence
  Description of Artificial Sequence: Synthetic antibody
RFTISRDDSKNTAYLQMNSLKTEDTAVYYCTRHAGAIGYWGQG

SEQ ID NO: 5089 - protein, 17 aa, Artificial Sequence
  Description of Artificial Sequence: Synthetic antibody
CARGNLYYYGSGSYVPW

SEQ ID NO: 5090 - DNA, 129 bp, Artificial Sequence
  Description of Artificial Sequence: Synthetic antibody
gacaacgccaagaactcgctgtatctgcaaatgagcagcctgagagccgacgacacggccgtgtattactgtgcgagagggaacctgtattactatggttcagggagttatgtcccctggggccaggga

SEQ ID NO: 5091 - protein, 43 aa, Artificial Sequence
  Description of Artificial Sequence: Synthetic antibody
DNAKNSLYLQMSSLRADDTAVYYCARGNLYYYGSGSYVPWGQG

SEQ ID NO: 5092 - DNA, 129 bp, Artificial Sequence
  Description of Artificial Sequence: Synthetic antibody
gacaacgccaagaactcactgtatctgcaaatgaacagcctgagagccgacgacgcggccgtgtattactgtgcgagagggaacctgtattactatggttcagggagttatgtcccctggggccaggga

SEQ ID NO: 5093 - protein, 43 aa, Artificial Sequence
  Description of Artificial Sequence: Synthetic antibody
DNAKNSLYLQMNSLRADDAAVYYCARGNLYYYGSGSYVPWGQG

SEQ ID NO: 5094 - DNA, 129 bp, Artificial Sequence
  Description of Artificial Sequence: Synthetic antibody
gacaacgccaagaactcactgtatctgcaaatgaacagcctgagagccgacgacacggccgtgtattactgtgcgagagggaacctgtattactatggttcagggagttatgtcccctggggccaggga

SEQ ID NO: 5095 - protein, 43 aa, Artificial Sequence
  Description of Artificial Sequence: Synthetic antibody
DNAKNSLYLQMNSLRADDTAVYYCARGNLYYYGSGSYVPWGQG

SEQ ID NO: 5096 - protein, 25 aa, Artificial Sequence
  Description of Artificial Sequence: Synthetic antibody
CARDPRNLDYYYDSSQTPADAFDIW

SEQ ID NO: 5097 - DNA, 129 bp, Artificial Sequence
  Description of Artificial Sequence: Synthetic antibody
atggtgctgtggagcctgagatctgacgacacggccgtgtattactgtgcgagagatccccgaaacttagactattactatgatagtagtcagacacccgccgatgcttttgatatctggggccaaggg

SEQ ID NO: 5098 - protein, 43 aa, Artificial Sequence
  Description of Artificial Sequence: Synthetic antibody
MVLWSLRSDDTAVYYCARDPRNLDYYYDSSQTPADAFDIWGQG

SEQ ID NO: 5099 - DNA, 129 bp, Artificial Sequence
  Description of Artificial Sequence: Synthetic antibody
atggtgctgaggagcctgagatctgacgacacggccgtgtattactgtgcgagagatccccgaaacttagactattactatgatagtagtcagacacccgccgatgcttttgatatctggggccaaggg

SEQ ID NO: 5100 - protein, 43 aa, Artificial Sequence
  Description of Artificial Sequence: Synthetic antibody
MVLRSLRSDDTAVYYCARDPRNLDYYYDSSQTPADAFDIWGQG

SEQ ID NO: 5101 - DNA, 129 bp, Artificial Sequence
  Description of Artificial Sequence: Synthetic antibody
atggagctgaggagcctgagatctgacgacacggccgtgtattactgtgcgagagatccccgaaacttagactattactatgatagtagtcagacacccgccgatgcttttgatatctggggccaaggg

SEQ ID NO: 5102 - protein, 43 aa, Artificial Sequence
  Description of Artificial Sequence: Synthetic antibody
MELRSLRSDDTAVYYCARDPRNLDYYYDSSQTPADAFDIWGQG

SEQ ID NO: 5103 - protein, 16 aa, Artificial Sequence
  Description of Artificial Sequence: Synthetic antibody
CARTKTSGYDSSFDYW

SEQ ID NO: 5104 - DNA, 129 bp, Artificial Sequence
  Description of Artificial Sequence: Synthetic antibody
agagatgattccaagaacaccttgtatctgcaaatgaacagcctgagagccgaggacacggccatatattactgtgcgagaactaaaactagtggctacgattcgtcctttgactactggggccaggga

SEQ ID NO: 5105 - protein, 43 aa, Artificial Sequence
  Description of Artificial Sequence: Synthetic antibody
RDDSKNTLYLQMNSLRAEDTAIYYCARTKTSGYDSSFDYWGQG

SEQ ID NO: 5106 - DNA, 129 bp, Artificial Sequence
  Description of Artificial Sequence: Synthetic antibody
agagataattccaagaacaccttgtatttgcaaatgaacagcctgagagccgaggacacggccatatattactgtgcgagaactaaaaccagtggctacgattcgtcctttgactactggggccaggga

SEQ ID NO: 5107 - protein, 43 aa, Artificial Sequence
  Description of Artificial Sequence: Synthetic antibody
RDNSKNTLYLQMNSLRAEDTAIYYCARTKTSGYDSSFDYWGQG

SEQ ID NO: 5108 - DNA, 129 bp, Artificial Sequence
  Description of Artificial Sequence: Synthetic antibody
agagataattccaagaacaccttgtatctgcaaatgaacagcctgagagccgaggacacggccatatattactgtgcgagaactaaaactagtggctacgattcgtcctttgactactggggccaggga

SEQ ID NO: 5109 - protein, 15 aa, Artificial Sequence
  Description of Artificial Sequence: Synthetic antibody
CARHVGYGNNWFDPW

SEQ ID NO: 5110 - DNA, 129 bp, Artificial Sequence
  Description of Artificial Sequence: Synthetic antibody
tcagtagacacgtccaagaaccagttctccctgaagttgagctctgtgaccgccgcagacacggccatgtattactgtgcgagacatgtaggctatgggaacaactggttcgacccctggggccaggga

SEQ ID NO: 5111 - protein, 43 aa, Artificial Sequence
  Description of Artificial Sequence: Synthetic antibody
SVDTSKNQFSLKLSSVTAADTAMYYCARHVGYGNNWFDPWGQG

SEQ ID NO: 5112 - DNA, 129 bp, Artificial Sequence
  Description of Artificial Sequence: Synthetic antibody
tcagtagacacgtccgagaaccacttctccctgagtctgacctctgtgaccgccgcagacacggccgtgtattactgtgcgagacatgttggctacgggaacaactggttcgacccctggggccaggga

SEQ ID NO: 5113 - protein, 43 aa, Artificial Sequence
  Description of Artificial Sequence: Synthetic antibody
SVDTSENHFSLSLTSVTAADTAVYYCARHVGYGNNWFDPWGQG

SEQ ID NO: 5114 - DNA, 129 bp, Artificial Sequence
  Description of Artificial Sequence: Synthetic antibody
tcagtagacacgtccaagaaccacttctccctgagtctgagctctgtgaccgccgcagacacggccgtgtattactgtgcgagacatgtaggctacgggaacaactggttcgacccctggggccaggga

SEQ ID NO: 5115 - protein, 43 aa, Artificial Sequence
  Description of Artificial Sequence: Synthetic antibody
SVDTSKNHFSLSLSSVTAADTAVYYCARHVGYGNNWFDPWGQG

SEQ ID NO: 5116 - protein, 22 aa, Artificial Sequence
  Description of Artificial Sequence: Synthetic antibody
CAKGEFRNYDFWSGYLDGMDVW

SEQ ID NO: 5117 - DNA, 129 bp, Artificial Sequence
  Description of Artificial Sequence: Synthetic antibody
tcgatgtatctgcaaatgaacagcctgagagccgaggacacggccgtatattactgtgcgaaaggagagttccggaattacgatttttggagtggttatttggacggtatggacgtctggggccaaggg

SEQ ID NO: 5118 - protein, 43 aa, Artificial Sequence
  Description of Artificial Sequence: Synthetic antibody
SMYLQMNSLRAEDTAVYYCAKGEFRNYDFWSGYLDGMDVWGQG

SEQ ID NO: 5119 - DNA, 129 bp, Artificial Sequence
  Description of Artificial Sequence: Synthetic antibody
acgctgtatctgcaaatgaacagcctgagagccgaggacacggccgtatattactgtgcgaaaggagagttccggaattacgatttttggagtggttatttggacggtatggacgtctggggccaaggg

SEQ ID NO: 5120 - protein, 43 aa, Artificial Sequence
  Description of Artificial Sequence: Synthetic antibody
TLYLQMNSLRAEDTAVYYCAKGEFRNYDFWSGYLDGMDVWGQG

SEQ ID NO: 5121 - DNA, 129 bp, Artificial Sequence
  Description of Artificial Sequence: Synthetic antibody
acgctgtatctccaaatcaacagcctgagagccgaggacacggccgtatattactgtgcgaaaggagagttccggaattacgatttttggagtggttatttggacggtatggacgtctggggccaaggg

SEQ ID NO: 5122 - protein, 43 aa, Artificial Sequence
  Description of Artificial Sequence: Synthetic antibody
TLYLQINSLRAEDTAVYYCAKGEFRNYDFWSGYLDGMDVWGQG

SEQ ID NO: 5123 - protein, 16 aa, Artificial Sequence
  Description of Artificial Sequence: Synthetic antibody
CAHGLGGWDGQYFDHW

SEQ ID NO: 5124 - DNA, 129 bp, Artificial Sequence
  Description of Artificial Sequence: Synthetic antibody
aaggacacgtccaataaccaggtggtccttagaatgaccaacatggaccctgcagacacagccacatattactgtgcacacggtcttggaggctgggatgggcagtattttgaccactgggggcaggga

SEQ ID NO: 5125 - protein, 43 aa, Artificial Sequence
  Description of Artificial Sequence: Synthetic antibody
KDTSNNQVVLRMTNMDPADTATYYCAHGLGGWDGQYFDHWGQG

SEQ ID NO: 5126 - DNA, 129 bp, Artificial Sequence
  Description of Artificial Sequence: Synthetic antibody
aaggacacgtccaaaaaccaggtggtgcttagaatgaccaacatgaaccctgcggacacagccacatattactgtgcacacggtcttggaggctgggatgggcagtattttgaccactgggggcaggga

SEQ ID NO: 5127 - protein, 43 aa, Artificial Sequence
  Description of Artificial Sequence: Synthetic antibody
KDTSKNQVVLRMTNMNPADTATYYCAHGLGGWDGQYFDHWGQG

SEQ ID NO: 5128 - DNA, 129 bp, Artificial Sequence
  Description of Artificial Sequence: Synthetic antibody
aaggacacctccaaaaaccaggtggtccttacaatgaccaacatggaccctgtggacacagccacatattactgtgcacacggtcttggaggctgggatgggcagtattttgaccactgggggcaggga

SEQ ID NO: 5129 - protein, 43 aa, Artificial Sequence
  Description of Artificial Sequence: Synthetic antibody
KDTSKNQVVLTMTNMDPVDTATYYCAHGLGGWDGQYFDHWGQG

SEQ ID NO: 5130 - protein, 13 aa, Artificial Sequence
  Description of Artificial Sequence: Synthetic antibody
CATSGSYYCFGYW

SEQ ID NO: 5131 - DNA, 129 bp, Artificial Sequence
  Description of Artificial Sequence: Synthetic antibody
accatctccatatataattccaagaacacgctgtatctgcaaatgaacagcctgagagccgaggacacggccgtatattactgtgcgaccagtgggagctactattgtttcggctactggggccaggga

SEQ ID NO: 5132 - protein, 43 aa, Artificial Sequence
  Description of Artificial Sequence: Synthetic antibody
TISIYNSKNTLYLQMNSLRAEDTAVYYCATSGSYYCFGYWGQG

SEQ ID NO: 5133 - DNA, 129 bp, Artificial Sequence
  Description of Artificial Sequence: Synthetic antibody
accatctccatacataattccaagaacacgctgtatctgcaaatgaacagcctgagagccgaggacacggccgtatattactgtgcgaccagtgggagctactattgtttcggctactggggccaggga

SEQ ID NO: 5134 - protein, 43 aa, Artificial Sequence
  Description of Artificial Sequence: Synthetic antibody
TISIHNSKNTLYLQMNSLRAEDTAVYYCATSGSYYCFGYWGQG

SEQ ID NO: 5135 - DNA, 129 bp, Artificial Sequence
  Description of Artificial Sequence: Synthetic antibody
accatctccagagataattccaagaacacgctgtatctgcaaatgaacagcctgagagccgaggacacggccgtatattactgtgcgaccagtgggagctactattgtttcggctactggggccaggga

SEQ ID NO: 5136 - protein, 43 aa, Artificial Sequence
  Description of Artificial Sequence: Synthetic antibody
TISRDNSKNTLYLQMNSLRAEDTAVYYCATSGSYYCFGYWGQG

SEQ ID NO: 5137 - protein, 18 aa, Artificial Sequence
  Description of Artificial Sequence: Synthetic antibody
CAKGYGSGSYNPGNFDYW

SEQ ID NO: 5138 - DNA, 129 bp, Artificial Sequence
  Description of Artificial Sequence: Synthetic antibody
tattccaagaacacgctgtttctgcaaatgaacagcctgagagccgaggacacggccgtatattattgtgcgaaaggttatggttcagggagttataatcccggaaactttgactactggggccaggga

SEQ ID NO: 5139 - protein, 43 aa, Artificial Sequence
  Description of Artificial Sequence: Synthetic antibody
YSKNTLFLQMNSLRAEDTAVYYCAKGYGSGSYNPGNFDYWGQG

SEQ ID NO: 5140 - DNA, 129 bp, Artificial Sequence
  Description of Artificial Sequence: Synthetic antibody
acttccaagaacacgctgtttctgcaaatgaacagcctgagagccgaggacacggccgtatattattgtgcgaaaggttatggttcagggagttataatcccggaaactttgactactggggccaggga

SEQ ID NO: 5141 - protein, 43 aa, Artificial Sequence
  Description of Artificial Sequence: Synthetic antibody
TSKNTLFLQMNSLRAEDTAVYYCAKGYGSGSYNPGNFDYWGQG

SEQ ID NO: 5142 - DNA, 129 bp, Artificial Sequence
  Description of Artificial Sequence: Synthetic antibody
aattccaagaacacgctgtttctgcaaatgaacagcctgagagccgaggacacggccgtatattattgtgcgaaaggttatggttcagggagttataatcccggaaactttgactactggggccaggga

SEQ ID NO: 5143 - protein, 43 aa, Artificial Sequence
  Description of Artificial Sequence: Synthetic antibody
NSKNTLFLQMNSLRAEDTAVYYCAKGYGSGSYNPGNFDYWGQG

SEQ ID NO: 5144 - protein, 22 aa, Artificial Sequence
  Description of Artificial Sequence: Synthetic antibody
CAREGADYDSVSQYYYYGMDVW

SEQ ID NO: 5145 - DNA, 129 bp, Artificial Sequence
  Description of Artificial Sequence: Synthetic antibody
acagtctacatggagctgagcagcctgagatctgaggacacggccgtgtattactgtgcgagagagggggccgactatgatagtgtcagccaatactactactacggtatggacgtctggggccaaggg

SEQ ID NO: 5146 - protein, 43 aa, Artificial Sequence
  Description of Artificial Sequence: Synthetic antibody
TVYMELSSLRSEDTAVYYCAREGADYDSVSQYYYYGMDVWGQG

SEQ ID NO: 5147 - DNA, 129 bp, Artificial Sequence
  Description of Artificial Sequence: Synthetic antibody
acagtctacatggagctgagcagcctgagatctgaggacacggccgtgtactactgtgcgagagagggggccgactatgatagtgtcagccaatactactactacggtatggacgtctggggccaaggg

SEQ ID NO: 5148 - DNA, 129 bp, Artificial Sequence
  Description of Artificial Sequence: Synthetic antibody
aaagtctacatggagctgagcagcctgagatctgaggacacggccgtgtattactgtgcgagagagggggccgactatgatagtgtcagccaatactactactacggtatggacgtctggggccaaggg

SEQ ID NO: 5149 - protein, 43 aa, Artificial Sequence
  Description of Artificial Sequence: Synthetic antibody
KVYMELSSLRSEDTAVYYCAREGADYDSVSQYYYYGMDVWGQG

SEQ ID NO: 5150 - protein, 17 aa, Artificial Sequence
  Description of Artificial Sequence: Synthetic antibody
CVRGGGGSGSSPPFEYW

SEQ ID NO: 5151 - DNA, 129 bp, Artificial Sequence
  Description of Artificial Sequence: Synthetic antibody
gacacgtccacgagcacattctacatggagctgagcagcctgaggtctgaggacacggccgtgtattattgtgtgagagggggcggcggttcagggagctccccaccttttgaatactggggccaggga

SEQ ID NO: 5152 - protein, 43 aa, Artificial Sequence
  Description of Artificial Sequence: Synthetic antibody
DTSTSTFYMELSSLRSEDTAVYYCVRGGGGSGSSPPFEYWGQG

SEQ ID NO: 5153 - DNA, 129 bp, Artificial Sequence
  Description of Artificial Sequence: Synthetic antibody
gacacgtccacgagcacattctacatggagctgagcagcctgagggctgaggacacggccgtgtattattgtgtgagagggggcggcggttcagggagctccccaccttttgaatactggggccaggga

SEQ ID NO: 5154 - protein, 43 aa, Artificial Sequence
  Description of Artificial Sequence: Synthetic antibody
DTSTSTFYMELSSLRAEDTAVYYCVRGGGGSGSSPPFEYWGQG

SEQ ID NO: 5155 - DNA, 129 bp, Artificial Sequence
  Description of Artificial Sequence: Synthetic antibody
gacacgcccacgagcacattctacatggagctgagcagcctgaggtctgaggacacggccgtgtattattgtgtgagagggggcggcggttcagggagctccccaccttttgaatactggggccaggga

SEQ ID NO: 5156 - protein, 43 aa, Artificial Sequence
  Description of Artificial Sequence: Synthetic antibody
DTPTSTFYMELSSLRSEDTAVYYCVRGGGGSGSSPPFEYWGQG

SEQ ID NO: 5157 - protein, 16 aa, Artificial Sequence
  Description of Artificial Sequence: Synthetic antibody
CARAGWRLQVPFCDYW

SEQ ID NO: 5158 - DNA, 129 bp, Artificial Sequence
  Description of Artificial Sequence: Synthetic antibody
tgggacaacgccaagaactcactgtatctgcaaatgaacagcctgagagccgaggacacggccgtgtattactgtgcgagggctggttggagactgcaagtccccttttgtgactactggggccaggga

SEQ ID NO: 5159 - protein, 43 aa, Artificial Sequence
  Description of Artificial Sequence: Synthetic antibody
WDNAKNSLYLQMNSLRAEDTAVYYCARAGWRLQVPFCDYWGQG

SEQ ID NO: 5160 - DNA, 129 bp, Artificial Sequence
  Description of Artificial Sequence: Synthetic antibody
agggacaacgccaagaactcactgtatctgcaaatgaacagcctgagagccgaggacacggccgtgtattactgtgcgagggctggttggagactgcaagtccccttttgtgactactggggccaggga

SEQ ID NO: 5161 - protein, 43 aa, Artificial Sequence
  Description of Artificial Sequence: Synthetic antibody
RDNAKNSLYLQMNSLRAEDTAVYYCARAGWRLQVPFCDYWGQG

SEQ ID NO: 5162 - protein, 17 aa, Artificial Sequence
  Description of Artificial Sequence: Synthetic antibody
CAKGPWDSSGWYYFDYW

SEQ ID NO: 5163 - DNA, 129 bp, Artificial Sequence
  Description of Artificial Sequence: Synthetic antibody
tataattccaacaacacgctgtatctgcaaatgaacagcctgagagccgaggacacggccgtatattactgtgcgaaaggtccttgggatagcagtggctggtactactttgactactggggccaggga

SEQ ID NO: 5164 - protein, 43 aa, Artificial Sequence
  Description of Artificial Sequence: Synthetic antibody
YNSNNTLYLQMNSLRAEDTAVYYCAKGPWDSSGWYYFDYWGQG

SEQ ID NO: 5165 - DNA, 129 bp, Artificial Sequence
  Description of Artificial Sequence: Synthetic antibody
gataattccaagaacacgctgtatctgcaaatgaacagcctgagagccgaggacacggccgtatattactgtgcgaaaggtccttgggatagcagtggctggtactactttgactactggggccaggga

SEQ ID NO: 5166 - protein, 43 aa, Artificial Sequence
  Description of Artificial Sequence: Synthetic antibody
DNSKNTLYLQMNSLRAEDTAVYYCAKGPWDSSGWYYFDYWGQG

SEQ ID NO: 5167 - protein, 23 aa, Artificial Sequence
  Description of Artificial Sequence: Synthetic antibody
CARDRSITIFGVAPLDGYGMDVW

SEQ ID NO: 5168 - DNA, 129 bp, Artificial Sequence
  Description of Artificial Sequence: Synthetic antibody
ctttatattcaaatgaacagcctgagagccgaggacacggccgtgtattactgtgcgagagatcggagtattacgatttttggagtggcccccctcgacgggtacggtatggacgtctggggccaaggg

SEQ ID NO: 5169 - protein, 43 aa, Artificial Sequence
  Description of Artificial Sequence: Synthetic antibody
LYIQMNSLRAEDTAVYYCARDRSITIFGVAPLDGYGMDVWGQG

SEQ ID NO: 5170 - DNA, 129 bp, Artificial Sequence
  Description of Artificial Sequence: Synthetic antibody
ctgtatcttcaaatgaacagcctgagagccgaggacacggccgtgtattactgtgcgagagatcggagtattacgatttttggagtggcccccctcgacgggtacggtatggacgtctggggccaaggg

SEQ ID NO: 5171 - protein, 43 aa, Artificial Sequence
  Description of Artificial Sequence: Synthetic antibody
LYLQMNSLRAEDTAVYYCARDRSITIFGVAPLDGYGMDVWGQG

SEQ ID NO: 5172 - protein, 13 aa, Artificial Sequence
  Description of Artificial Sequence: Synthetic antibody
CATLLLRGKLDVW

SEQ ID NO: 5173 - DNA, 129 bp, Artificial Sequence
  Description of Artificial Sequence: Synthetic antibody
agcatcaacccagacacatccaagaacctgttctccctgcagctgaactctgtgactcccgaggacacggctgtttattactgtgcaacattattgcttcgggggaagttggacgtctggggccaaggg

SEQ ID NO: 5174 - protein, 43 aa, Artificial Sequence
  Description of Artificial Sequence: Synthetic antibody
SINPDTSKNLFSLQLNSVTPEDTAVYYCATLLLRGKLDVWGQG

SEQ ID NO: 5175 - DNA, 129 bp, Artificial Sequence
  Description of Artificial Sequence: Synthetic antibody
accatcaacccagacacatccaagaaccagttctccctgcagttgaactctgtgactcccgaggatacgggtgtttattactgtgcaacattattgcttcgggggaagttggacgtctggggccaaggg

SEQ ID NO: 5176 - protein, 43 aa, Artificial Sequence
  Description of Artificial Sequence: Synthetic antibody
TINPDTSKNQFSLQLNSVTPEDTGVYYCATLLLRGKLDVWGQG

SEQ ID NO: 5177 - protein, 14 aa, Artificial Sequence
  Description of Artificial Sequence: Synthetic antibody
CARVWSSSSVFDYW

SEQ ID NO: 5178 - DNA, 129 bp, Artificial Sequence
  Description of Artificial Sequence: Synthetic antibody
ttgaccacacacacatccacgagcacagcctacatggagctgaggagcctgagatctgacgacacggccgtgtattactgtgcgagagtttggagcagctcgtccgtctttgactactggggccaggga

SEQ ID NO: 5179 - protein, 43 aa, Artificial Sequence
  Description of Artificial Sequence: Synthetic antibody
LTTHTSTSTAYMELRSLRSDDTAVYYCARVWSSSSVFDYWGQG

SEQ ID NO: 5180 - DNA, 129 bp, Artificial Sequence
  Description of Artificial Sequence: Synthetic antibody
atgaccacagacacatccacgagcacagcctacatggagctgaggagcctgagatctgacgacacggccgtgtattactgtgcgagagtttggagcagctcgtccgtctttgactactggggccaggga

SEQ ID NO: 5181 - protein, 43 aa, Artificial Sequence
  Description of Artificial Sequence: Synthetic antibody
MTTDTSTSTAYMELRSLRSDDTAVYYCARVWSSSSVFDYWGQG

SEQ ID NO: 5182 - protein, 15 aa, Artificial Sequence
  Description of Artificial Sequence: Synthetic antibody
CARSDYYDSSGYRNW

SEQ ID NO: 5183 - DNA, 129 bp, Artificial Sequence
  Description of Artificial Sequence: Synthetic antibody
ctccaaggacacctccaaaaccaggtggtccttacaatgaccaacatggaccctgtggacacagccacgtattactgtgcacgatcggattactatgatagtagtggttatcgtaactggggccaggga

SEQ ID NO: 5184 - protein, 43 aa, Artificial Sequence
  Description of Artificial Sequence: Synthetic antibody
LQGHLQNQVVLTMTNMDPVDTATYYCARSDYYDSSGYRNWGQG

SEQ ID NO: 5185 - DNA, 129 bp, Artificial Sequence
  Description of Artificial Sequence: Synthetic antibody
tccaaggacacctccaaaaaccaggtggtccttacaatgaccaacatggaccctgtggacacagccacgtattactgtgcacgatcggattactatgatagtagtggttatcgtaactggggccaggga

SEQ ID NO: 5186 - protein, 43 aa, Artificial Sequence
  Description of Artificial Sequence: Synthetic antibody
SKDTSKNQVVLTMTNMDPVDTATYYCARSDYYDSSGYRNWGQG

SEQ ID NO: 5187 - protein, 19 aa, Artificial Sequence
  Description of Artificial Sequence: Synthetic antibody
CTTDRPSYYDFWRPDFDYW

SEQ ID NO: 5188 - DNA, 129 bp, Artificial Sequence
  Description of Artificial Sequence: Synthetic antibody
tcaaaaaacacgctgtatctgcaaatgaacagcctgaaaaccgaggacacagccgtgtattactgtaccacagatcggcccagttattacgatttttggaggccggactttgactactggggccaggga

SEQ ID NO: 5189 - protein, 43 aa, Artificial Sequence
  Description of Artificial Sequence: Synthetic antibody
SKNTLYLQMNSLKTEDTAVYYCTTDRPSYYDFWRPDFDYWGQG

SEQ ID NO: 5190 - DNA, 129 bp, Artificial Sequence
  Description of Artificial Sequence: Synthetic antibody
ttcaaaaacacgctgtatctgcaaatgaacagcctgaaaaccgaggacacagccgtgtattactgtaccacagatcggcccagttattacgatttttggaggccggactttgactactggggccaggga

SEQ ID NO: 5191 - protein, 43 aa, Artificial Sequence
  Description of Artificial Sequence: Synthetic antibody
FKNTLYLQMNSLKTEDTAVYYCTTDRPSYYDFWRPDFDYWGQG

SEQ ID NO: 5192 - protein, 12 aa, Artificial Sequence
  Description of Artificial Sequence: Synthetic antibody
CTTPFFRLPQAW

SEQ ID NO: 5193 - DNA, 129 bp, Artificial Sequence
  Description of Artificial Sequence: Synthetic antibody
ttcaccatctcaagagatgattcaaaaaacatggtgtatctgcaaatgaacagcctgaaaaccgaggacacagccgtgtattattgtaccacccctttcttccggctgccccaggcctggggcctggga

SEQ ID NO: 5194 - protein, 43 aa, Artificial Sequence
  Description of Artificial Sequence: Synthetic antibody
FTISRDDSKNMVYLQMNSLKTEDTAVYYCTTPFFRLPQAWGLG

SEQ ID NO: 5195 - DNA, 129 bp, Artificial Sequence
  Description of Artificial Sequence: Synthetic antibody
ttcaccatctcaagagatgattcaaaaaacatggtgtatctgcaaatgaacaacctgaaaaccgaggacacagccgtgtattattgtaccacccctttcttccggctgccccaggcctggggcctggga

SEQ ID NO: 5196 - protein, 43 aa, Artificial Sequence
  Description of Artificial Sequence: Synthetic antibody
FTISRDDSKNMVYLQMNNLKTEDTAVYYCTTPFFRLPQAWGLG

SEQ ID NO: 5197 - protein, 23 aa, Artificial Sequence
  Description of Artificial Sequence: Synthetic antibody
CTSPYKYGSGSYYDYYYYGMDVW

SEQ ID NO: 5198 - DNA, 129 bp, Artificial Sequence
  Description of Artificial Sequence: Synthetic antibody
gcgtatctgcaaatgaacagcctgaaaaccgaggacacggccgtgtattactgtactagcccttacaaatatggttcggggagttattacgactactactactacggtatggacgtctggggccaaggg

SEQ ID NO: 5199 - protein, 43 aa, Artificial Sequence
  Description of Artificial Sequence: Synthetic antibody
AYLQMNSLKTEDTAVYYCTSPYKYGSGSYYDYYYYGMDVWGQG

SEQ ID NO: 5200 - DNA, 129 bp, Artificial Sequence
  Description of Artificial Sequence: Synthetic antibody
gagtatctgcaaatcaacagcctgaaaaccgaggacacggccgtgtattactgtactagcccttacaaatatggttcggggagttattacgactactactactacggtatggacgtctggggccaaggg

SEQ ID NO: 5201 - protein, 43 aa, Artificial Sequence
  Description of Artificial Sequence: Synthetic antibody
EYLQINSLKTEDTAVYYCTSPYKYGSGSYYDYYYYGMDVWGQG

SEQ ID NO: 5202 - protein, 12 aa, Artificial Sequence
  Description of Artificial Sequence: Synthetic antibody
CTTPGDGPNDYW

SEQ ID NO: 5203 - DNA, 129 bp, Artificial Sequence
  Description of Artificial Sequence: Synthetic antibody
ttcaccatctcaagagatgattcaaaaaacgcgctgtatctgcaaatgaacagcctgaaaaccgaggacacagccgtgtattactgtaccacacctggtgacggacccaatgactactggggccaggga

SEQ ID NO: 5204 - protein, 43 aa, Artificial Sequence
  Description of Artificial Sequence: Synthetic antibody
FTISRDDSKNALYLQMNSLKTEDTAVYYCTTPGDGPNDYWGQG

SEQ ID NO: 5205 - DNA, 129 bp, Artificial Sequence
  Description of Artificial Sequence: Synthetic antibody
ttcaccatctcaagagatgattcaaaaaacacgctgtatctgcaaatgaacagcctgaaaaccgaggacacagccgtgtattactgtaccacacctggtgacggacccaatgactactggggccaggga

SEQ ID NO: 5206 - protein, 43 aa, Artificial Sequence
  Description of Artificial Sequence: Synthetic antibody
FTISRDDSKNTLYLQMNSLKTEDTAVYYCTTPGDGPNDYWGQG

SEQ ID NO: 5207 - protein, 15 aa, Artificial Sequence
  Description of Artificial Sequence: Synthetic antibody
CAKDRSGWNGGFHFW

SEQ ID NO: 5208 - DNA, 129 bp, Artificial Sequence
  Description of Artificial Sequence: Synthetic antibody
ctccagagatacttccaaaatacactttatctacaaatgaacagcctgagggccgaggacacggccgtatattactgtgcgaaagatcgcagtggctggaacgggggattccacttctggggccagggc

SEQ ID NO: 5209 - protein, 43 aa, Artificial Sequence
  Description of Artificial Sequence: Synthetic antibody
LQRYFQNTLYLQMNSLRAEDTAVYYCAKDRSGWNGGFHFWGQG

SEQ ID NO: 5210 - DNA, 129 bp, Artificial Sequence
  Description of Artificial Sequence: Synthetic antibody
tccagagatacttccaaaaatacactttatctacaaatgaacagcctgagggccgaggacacggccgtatattactgtgcgaaagatcgcagtggctggaacgggggattccacttctggggccagggc

SEQ ID NO: 5211 - protein, 43 aa, Artificial Sequence
  Description of Artificial Sequence: Synthetic antibody
SRDTSKNTLYLQMNSLRAEDTAVYYCAKDRSGWNGGFHFWGQG

SEQ ID NO: 5212 - protein, 15 aa, Artificial Sequence
  Description of Artificial Sequence: Synthetic antibody
CAKSTDFWSGGFDSW

SEQ ID NO: 5213 - DNA, 129 bp, Artificial Sequence
  Description of Artificial Sequence: Synthetic antibody
tccagagacaattccaaggacacgctgtatctgcagatggacagcctgagagtcgaggacacggccgtatattactgtgcaaagtctaccgatttttggagtggtggttttgactcctggggccaggga

SEQ ID NO: 5214 - protein, 43 aa, Artificial Sequence
  Description of Artificial Sequence: Synthetic antibody
SRDNSKDTLYLQMDSLRVEDTAVYYCAKSTDFWSGGFDSWGQG

SEQ ID NO: 5215 - DNA, 129 bp, Artificial Sequence
  Description of Artificial Sequence: Synthetic antibody
tccagacacaattccacggacacgctgtatctgcagatggacagcctgagagtcgaggacacggccgtatattactgtgcaaagtctaccgatttttggagtggtggttttgactcctggggccaggga

SEQ ID NO: 5216 - protein, 43 aa, Artificial Sequence
  Description of Artificial Sequence: Synthetic antibody
SRHNSTDTLYLQMDSLRVEDTAVYYCAKSTDFWSGGFDSWGQG

SEQ ID NO: 5217 - protein, 13 aa, Artificial Sequence
  Description of Artificial Sequence: Synthetic antibody
CARDRDFRDLDYW

SEQ ID NO: 5218 - DNA, 129 bp, Artificial Sequence
  Description of Artificial Sequence: Synthetic antibody
atcatcaacccagacacatccaggaaccagttctccctgcagctgaactctgtgactcccgcggacacggctgtgtattactgtgcaagagatagggatttcagggatcttgactactggggccaggga

SEQ ID NO: 5219 - protein, 43 aa, Artificial Sequence
  Description of Artificial Sequence: Synthetic antibody
IINPDTSRNQFSLQLNSVTPADTAVYYCARDRDFRDLDYWGQG

SEQ ID NO: 5220 - DNA, 129 bp, Artificial Sequence
  Description of Artificial Sequence: Synthetic antibody
atcatcaacccagacacatccaagaaccagttctccctgcagctgaactctgtgactcccgcggacacggctgtgtattactgtgcaagagatagggatttcagggatcttgactactggggccaggga

SEQ ID NO: 5221 - protein, 43 aa, Artificial Sequence
  Description of Artificial Sequence: Synthetic antibody
IINPDTSKNQFSLQLNSVTPADTAVYYCARDRDFRDLDYWGQG

SEQ ID NO: 5222 - protein, 17 aa, Artificial Sequence
  Description of Artificial Sequence: Synthetic antibody
CARPASSSGWYGGLDYW

SEQ ID NO: 5223 - DNA, 129 bp, Artificial Sequence
  Description of Artificial Sequence: Synthetic antibody
gacaagtctatcaccaccgcctacctgcagtggagcagcctgaaggcctcggacaccgccatgtattactgtgcgagaccagcatctagcagtggctggtacggaggattggactactggggccaggga

SEQ ID NO: 5224 - protein, 43 aa, Artificial Sequence
  Description of Artificial Sequence: Synthetic antibody
DKSITTAYLQWSSLKASDTAMYYCARPASSSGWYGGLDYWGQG

SEQ ID NO: 5225 - DNA, 129 bp, Artificial Sequence
  Description of Artificial Sequence: Synthetic antibody
gacaagtccatcagcaccgcctacctgcagtggagcagcctgaaggcctcggacaccgccatgtatttctgtgcgagaccagcatctagcagtggctggtacggaggattggactactggggccaggga

SEQ ID NO: 5226 - protein, 43 aa, Artificial Sequence
  Description of Artificial Sequence: Synthetic antibody
DKSISTAYLQWSSLKASDTAMYFCARPASSSGWYGGLDYWGQG

SEQ ID NO: 5227 - protein, 11 aa, Artificial Sequence
  Description of Artificial Sequence: Synthetic antibody
CAKDMQNFDYW

SEQ ID NO: 5228 - DNA, 129 bp, Artificial Sequence
  Description of Artificial Sequence: Synthetic antibody
cggttcaccatctccagagacaattccaagaacacgctgtatctgcaaatgaacagcctgagagccgaggacacggccgtatattactgtgcgaaagacatgcaaaactttgactactggggccaggga

SEQ ID NO: 5229 - protein, 43 aa, Artificial Sequence
  Description of Artificial Sequence: Synthetic antibody
RFTISRDNSKNTLYLQMNSLRAEDTAVYYCAKDMQNFDYWGQG

SEQ ID NO: 5230 - DNA, 129 bp, Artificial Sequence
  Description of Artificial Sequence: Synthetic antibody
cggttcaccatctccagacacaattccaagaacacgctgtatctgcaaatcaacagcctgagagccgaggacacggccgtatattactgtgcgaaagacatgcaaaactttgactactggggccaggga

SEQ ID NO: 5231 - protein, 43 aa, Artificial Sequence
  Description of Artificial Sequence: Synthetic antibody
RFTISRHNSKNTLYLQINSLRAEDTAVYYCAKDMQNFDYWGQG

SEQ ID NO: 5232 - protein, 17 aa, Artificial Sequence
  Description of Artificial Sequence: Synthetic antibody
CAKAKEGWLFRGYFDYW

SEQ ID NO: 5233 - DNA, 129 bp, Artificial Sequence
  Description of Artificial Sequence: Synthetic antibody
gacaattccaagaacacgctgtatctgcaaatgaacagcctgagagccgaggacacggccgtatattactgtgcgaaagcgaaggaggggtggttatttcgggggtactttgactactggggccaggga

SEQ ID NO: 5234 - protein, 43 aa, Artificial Sequence
  Description of Artificial Sequence: Synthetic antibody
DNSKNTLYLQMNSLRAEDTAVYYCAKAKEGWLFRGYFDYWGQG

SEQ ID NO: 5235 - DNA, 129 bp, Artificial Sequence
  Description of Artificial Sequence: Synthetic antibody
gacaattccaagaacacgctgtatctacaaataaacagcctgagagccgaggacacggccgtatattactgtgcgaaagcgaaggaggggtggttatttcgggggtactttgactactggggccaggga

SEQ ID NO: 5236 - protein, 43 aa, Artificial Sequence
  Description of Artificial Sequence: Synthetic antibody
DNSKNTLYLQINSLRAEDTAVYYCAKAKEGWLFRGYFDYWGQG

SEQ ID NO: 5237 - protein, 17 aa, Artificial Sequence
  Description of Artificial Sequence: Synthetic antibody
CARMVAPIYYFYGMDVW

SEQ ID NO: 5238 - DNA, 129 bp, Artificial Sequence
  Description of Artificial Sequence: Synthetic antibody
gacacctccagaaaccaggtggtccttacaatgaccaacgtggaccctgtggacacagccacgtattactgtgcacggatggtggcccccatctactacttctacggtatggacgtctggggccaaggg

SEQ ID NO: 5239 - protein, 43 aa, Artificial Sequence
  Description of Artificial Sequence: Synthetic antibody
DTSRNQVVLTMTNVDPVDTATYYCARMVAPIYYFYGMDVWGQG

SEQ ID NO: 5240 - DNA, 129 bp, Artificial Sequence
  Description of Artificial Sequence: Synthetic antibody
gacacccccagaaaccaggtggtccttacaatgaccaacgtggaccctgtggacacagccacgtgttactgtgcacggatggtggcccccatctactacttctacggtatggacgtctggggccaaggg

SEQ ID NO: 5241 - protein, 43 aa, Artificial Sequence
  Description of Artificial Sequence: Synthetic antibody
DTPRNQVVLTMTNVDPVDTATCYCARMVAPIYYFYGMDVWGQG

SEQ ID NO: 5242 - protein, 13 aa, Artificial Sequence
  Description of Artificial Sequence: Synthetic antibody
CARVRDGALLDYW

SEQ ID NO: 5243 - DNA, 129 bp, Artificial Sequence
  Description of Artificial Sequence: Synthetic antibody
acgattaccgcggacaaatccacgagcacagcctacatggagctgagcagcctgagatctgaggacacggccgtgtattactgtgcgagagtgagggacggtgccctacttgactactggggccgggga

SEQ ID NO: 5244 - protein, 43 aa, Artificial Sequence
  Description of Artificial Sequence: Synthetic antibody
TITADKSTSTAYMELSSLRSEDTAVYYCARVRDGALLDYWGRG

SEQ ID NO: 5245 - DNA, 129 bp, Artificial Sequence
  Description of Artificial Sequence: Synthetic antibody
acgattaccgcggacaaatccacgagcacagcctacatggagctgagcagcctgagatctgaggacacggccgtgtattactgtgcgagagtgagggacggtgccctacttgactactggggccaggga

SEQ ID NO: 5246 - protein, 43 aa, Artificial Sequence
  Description of Artificial Sequence: Synthetic antibody
TITADKSTSTAYMELSSLRSEDTAVYYCARVRDGALLDYWGQG

SEQ ID NO: 5247 - protein, 21 aa, Artificial Sequence
  Description of Artificial Sequence: Synthetic antibody
CARETVDTAMVYYYYYGMDVW

SEQ ID NO: 5248 - DNA, 129 bp, Artificial Sequence
  Description of Artificial Sequence: Synthetic antibody
tgcacagcctacttggagctgagcagcctgagatctgaggacacggccgtgtattactgtgcgagagagaccgtggatacagctatggtctactactactactacggtatggacgtctggggccaaggg

SEQ ID NO: 5249 - protein, 43 aa, Artificial Sequence
  Description of Artificial Sequence: Synthetic antibody
CTAYLELSSLRSEDTAVYYCARETVDTAMVYYYYYGMDVWGQG

SEQ ID NO: 5250 - DNA, 129 bp, Artificial Sequence
  Description of Artificial Sequence: Synthetic antibody
agcacagcctacatggagctgagcagcctgagatctgaggacacggccgtgtattactgtgcgagagagaccgtggatacagctatggtctactactactactacggtatggacgtctggggccaaggg

SEQ ID NO: 5251 - protein, 43 aa, Artificial Sequence
  Description of Artificial Sequence: Synthetic antibody
STAYMELSSLRSEDTAVYYCARETVDTAMVYYYYYGMDVWGQG

SEQ ID NO: 5252 - protein, 15 aa, Artificial Sequence
  Description of Artificial Sequence: Synthetic antibody
CAKAGGNPTDAFDIW

SEQ ID NO: 5253 - DNA, 129 bp, Artificial Sequence
  Description of Artificial Sequence: Synthetic antibody
tccagatataattccaagaacacgctgtatctgcaaatgaacagcctgagagccgaggacacggccgtatattactgtgcgaaagccggtggtaaccctacggatgcttttgatatctggggccaaggg

SEQ ID NO: 5254 - protein, 43 aa, Artificial Sequence
  Description of Artificial Sequence: Synthetic antibody
SRYNSKNTLYLQMNSLRAEDTAVYYCAKAGGNPTDAFDIWGQG

SEQ ID NO: 5255 - DNA, 129 bp, Artificial Sequence
  Description of Artificial Sequence: Synthetic antibody
tccagagataattccaagaacacgctgtatctgcaaatgaacagcctgagagccgaggacacggccgtatattactgtgcgaaagccggtggtaaccctacggatgcttttgatatctggggccaaggg

SEQ ID NO: 5256 - protein, 43 aa, Artificial Sequence
  Description of Artificial Sequence: Synthetic antibody
SRDNSKNTLYLQMNSLRAEDTAVYYCAKAGGNPTDAFDIWGQG

SEQ ID NO: 5257 - protein, 21 aa, Artificial Sequence
  Description of Artificial Sequence: Synthetic antibody
CARGDSGDRDTAMVKGYFDYW

SEQ ID NO: 5258 - DNA, 129 bp, Artificial Sequence
  Description of Artificial Sequence: Synthetic antibody
tgcacagtctacatggagctgagcagcctgagatctgaggacacggccgtgtattactgtgcgagaggggattcgggagaccgggatacagctatggttaaggggtactttgactactggggccaggga

SEQ ID NO: 5259 - protein, 43 aa, Artificial Sequence
  Description of Artificial Sequence: Synthetic antibody
CTVYMELSSLRSEDTAVYYCARGDSGDRDTAMVKGYFDYWGQG

SEQ ID NO: 5260 - DNA, 129 bp, Artificial Sequence
  Description of Artificial Sequence: Synthetic antibody
agcacagtctacatggagctgagcagcctgagatctgaggacacggccgtgtattactgtgcgagaggggattcgggagaccgggatacagctatggttaaggggtactttgactactggggccaggga

SEQ ID NO: 5261 - protein, 43 aa, Artificial Sequence
  Description of Artificial Sequence: Synthetic antibody
STVYMELSSLRSEDTAVYYCARGDSGDRDTAMVKGYFDYWGQG

SEQ ID NO: 5262 - protein, 16 aa, Artificial Sequence
  Description of Artificial Sequence: Synthetic antibody
CASSCGGYAHACFDYW

SEQ ID NO: 5263 - DNA, 129 bp, Artificial Sequence
  Description of Artificial Sequence: Synthetic antibody
tgggacacgtccacgagcacagtctacatggagctgagcagcctgagatctgaggacacggccgtgtattactgtgcgagctcatgcggtggctacgcccatgcctgttttgactactggggccaggga

SEQ ID NO: 5264 - protein, 43 aa, Artificial Sequence
  Description of Artificial Sequence: Synthetic antibody
WDTSTSTVYMELSSLRSEDTAVYYCASSCGGYAHACFDYWGQG

SEQ ID NO: 5265 - DNA, 129 bp, Artificial Sequence
  Description of Artificial Sequence: Synthetic antibody
agggacacgtccacgagcacagtctacatggagctgagcagcctgagatctgaggacacggccgtgtattactgtgcgagctcatgcggtggctacgcccatgcctgttttgactactggggccaggga

SEQ ID NO: 5266 - protein, 43 aa, Artificial Sequence
  Description of Artificial Sequence: Synthetic antibody
RDTSTSTVYMELSSLRSEDTAVYYCASSCGGYAHACFDYWGQG

SEQ ID NO: 5267 - protein, 21 aa, Artificial Sequence
  Description of Artificial Sequence: Synthetic antibody
CASRGITMVRGAAYYYGMDVW

SEQ ID NO: 5268 - DNA, 129 bp, Artificial Sequence
  Description of Artificial Sequence: Synthetic antibody
agcacagcctacatggagctgagcagcctgagatctgaggacacggccgtgtattactgtgcgagtagaggtattactatggttcggggcgcagcctactactacggtatggacgtctggggccaaggg

SEQ ID NO: 5269 - protein, 43 aa, Artificial Sequence
  Description of Artificial Sequence: Synthetic antibody
STAYMELSSLRSEDTAVYYCASRGITMVRGAAYYYGMDVWGQG

SEQ ID NO: 5270 - DNA, 129 bp, Artificial Sequence
  Description of Artificial Sequence: Synthetic antibody
agcacagcctacatggagctgagcagcctgagatctgaggacacggccgtgtattactgtgcgagtagaggtattactatggttcggggcgcagcctactactacggtatggacgtctggagccaaggg

SEQ ID NO: 5271 - protein, 43 aa, Artificial Sequence
  Description of Artificial Sequence: Synthetic antibody
STAYMELSSLRSEDTAVYYCASRGITMVRGAAYYYGMDVWSQG

SEQ ID NO: 5272 - protein, 15 aa, Artificial Sequence
  Description of Artificial Sequence: Synthetic antibody
CESGLAGLLYYFDYW

SEQ ID NO: 5273 - DNA, 129 bp, Artificial Sequence
  Description of Artificial Sequence: Synthetic antibody
ctcaagcaacaccctttaagtgcagtctgccttacaatgaccaatctgaaagccaaggacaaggtcatgtattactgtgagtctgggctggctgggctcctttactactttgactactggggccaggga

SEQ ID NO: 5274 - protein, 43 aa, Artificial Sequence
  Description of Artificial Sequence: Synthetic antibody
LKQHPLSAVCLTMTNLKAKDKVMYYCESGLAGLLYYFDYWGQG

SEQ ID NO: 5275 - DNA, 129 bp, Artificial Sequence
  Description of Artificial Sequence: Synthetic antibody
tcaagcaacacccttttaagtgcagtctgccttacaatgaccaatctgaaagccaaggacaaggtcatgtattactgtgagtctgggctggctgggctcctttactactttgactactggggccaggga

SEQ ID NO: 5276 - protein, 43 aa, Artificial Sequence
  Description of Artificial Sequence: Synthetic antibody
SSNTLLSAVCLTMTNLKAKDKVMYYCESGLAGLLYYFDYWGQG

SEQ ID NO: 5277 - protein, 13 aa, Artificial Sequence
  Description of Artificial Sequence: Synthetic antibody
CAKLVQRAGSDYW

SEQ ID NO: 5278 - DNA, 129 bp, Artificial Sequence
  Description of Artificial Sequence: Synthetic antibody
accatttccagagacaacaccaagaactccctctttctgcaaatgaacagtctgagacctgaggacacggccttgtattactgtgcaaaactggtccaacgagctggttcggactactggggccaggga

SEQ ID NO: 5279 - protein, 43 aa, Artificial Sequence
  Description of Artificial Sequence: Synthetic antibody
TISRDNTKNSLFLQMNSLRPEDTALYYCAKLVQRAGSDYWGQG

SEQ ID NO: 5280 - DNA, 129 bp, Artificial Sequence
  Description of Artificial Sequence: Synthetic antibody
aacatttccagagacaacaccaagaactccctctttctgcaaatgaacagtctgagacctgaggacacggccttgtattactgtgcaaaactggtccaacgagctggttcggactactggggccaggga

SEQ ID NO: 5281 - protein, 43 aa, Artificial Sequence
  Description of Artificial Sequence: Synthetic antibody
NISRDNTKNSLFLQMNSLRPEDTALYYCAKLVQRAGSDYWGQG

SEQ ID NO: 5282 - protein, 15 aa, Artificial Sequence
  Description of Artificial Sequence: Synthetic antibody
CAKDRAAGIYGMDVW

SEQ ID NO: 5283 - DNA, 129 bp, Artificial Sequence
  Description of Artificial Sequence: Synthetic antibody
tccagagataattccaagaacacgctgtatctgcaaatgaacagcctgagagccgaggacacggccgtatattactgtgcgaaagatcgggcagctggtatttacggtatggacgtctggggccaaggg

SEQ ID NO: 5284 - protein, 43 aa, Artificial Sequence
  Description of Artificial Sequence: Synthetic antibody
SRDNSKNTLYLQMNSLRAEDTAVYYCAKDRAAGIYGMDVWGQG

SEQ ID NO: 5285 - DNA, 129 bp, Artificial Sequence
  Description of Artificial Sequence: Synthetic antibody
tacagagataattccaagaacacgctgtatctgcaaatgaacagcctgagagccgatgacacggccgtatattactgtgcgaaagatcgggcagctggtatttacggtatggacgtctggggccaaggg

SEQ ID NO: 5286 - protein, 43 aa, Artificial Sequence
  Description of Artificial Sequence: Synthetic antibody
YRDNSKNTLYLQMNSLRADDTAVYYCAKDRAAGIYGMDVWGQG

SEQ ID NO: 5287 - protein, 20 aa, Artificial Sequence
  Description of Artificial Sequence: Synthetic antibody
CTTRLSNGAAAGSPDAFDIW

SEQ ID NO: 5288 - DNA, 129 bp, Artificial Sequence
  Description of Artificial Sequence: Synthetic antibody
aaaaacacgctgtatctgcaaatgaacagcctgaaaaccgaggacacagccgtgtattactgtaccacaagactatccaatggggcagcagctggtagccctgatgcttttgatatctggggccaaggg

SEQ ID NO: 5289 - protein, 43 aa, Artificial Sequence
  Description of Artificial Sequence: Synthetic antibody
KNTLYLQMNSLKTEDTAVYYCTTRLSNGAAAGSPDAFDIWGQG

SEQ ID NO: 5290 - DNA, 129 bp, Artificial Sequence
  Description of Artificial Sequence: Synthetic antibody
aaaaacacgctgtatccgcaaatgaacagcctgaaaaccgaggacacagccgtgtattactgtaccacaagactatccaatggggcagcagctggtagccctgatgcttttgatatctggggccaaggg

SEQ ID NO: 5291 - protein, 43 aa, Artificial Sequence
  Description of Artificial Sequence: Synthetic antibody
KNTLYPQMNSLKTEDTAVYYCTTRLSNGAAAGSPDAFDIWGQG

SEQ ID NO: 5292 - protein, 21 aa, Artificial Sequence
  Description of Artificial Sequence: Synthetic antibody
CAAQRRDGYISYYYYYGMDVW

SEQ ID NO: 5293 - DNA, 129 bp, Artificial Sequence
  Description of Artificial Sequence: Synthetic antibody
tgcacagcctacttggagctgagcagcctgagatccgaggacacggccgtgtattactgtgcggcacaacgtagagatggctacatatcatactactactactacggtatggacgtctggggccaaggg

SEQ ID NO: 5294 - protein, 43 aa, Artificial Sequence
  Description of Artificial Sequence: Synthetic antibody
CTAYLELSSLRSEDTAVYYCAAQRRDGYISYYYYYGMDVWGQG

SEQ ID NO: 5295 - DNA, 129 bp, Artificial Sequence
  Description of Artificial Sequence: Synthetic antibody
agcacagcctacatggagctgagcagcctgagatccgaggacacggccgtgtattactgtgcggcacaacgtagagatggctacatatcatactactactactacggtatggacgtctggggccaaggg

SEQ ID NO: 5296 - protein, 43 aa, Artificial Sequence
  Description of Artificial Sequence: Synthetic antibody
STAYMELSSLRSEDTAVYYCAAQRRDGYISYYYYYGMDVWGQG

SEQ ID NO: 5297 - protein, 16 aa, Artificial Sequence
  Description of Artificial Sequence: Synthetic antibody
CAKGASLGFGELFDYW

SEQ ID NO: 5298 - DNA, 129 bp, Artificial Sequence
  Description of Artificial Sequence: Synthetic antibody
ttagataattccaagaacacgctgtatctgcaaatgaacagcctgagagccgaggacacggccgtatattactgtgcgaaaggagcctctttggggttcggggagttatttgactactggggccaggga

SEQ ID NO: 5299 - protein, 43 aa, Artificial Sequence
  Description of Artificial Sequence: Synthetic antibody
LDNSKNTLYLQMNSLRAEDTAVYYCAKGASLGFGELFDYWGQG

SEQ ID NO: 5300 - DNA, 129 bp, Artificial Sequence
  Description of Artificial Sequence: Synthetic antibody
agagataattccaagaacacgctgtatctgcaaatgaacagcctgagagccgaggacacggccgtatattactgtgcgaaaggagcctctttggggttcggggagttatttgactactggggccaggga

SEQ ID NO: 5301 - protein, 43 aa, Artificial Sequence
  Description of Artificial Sequence: Synthetic antibody
RDNSKNTLYLQMNSLRAEDTAVYYCAKGASLGFGELFDYWGQG

SEQ ID NO: 5302 - protein, 15 aa, Artificial Sequence
  Description of Artificial Sequence: Synthetic antibody
CARSRPSVGGAFDIW

SEQ ID NO: 5303 - DNA, 129 bp, Artificial Sequence
  Description of Artificial Sequence: Synthetic antibody
gaccaggacacgtccatcagcacagcctacatggagctgagcagcctcagatctgacgacacggtcgtgttttactgtgcgagatcgcggcctagtgtgggcggtgcttttgatatctggggccaaggg

SEQ ID NO: 5304 - protein, 43 aa, Artificial Sequence
  Description of Artificial Sequence: Synthetic antibody
DQDTSISTAYMELSSLRSDDTVVFYCARSRPSVGGAFDIWGQG

SEQ ID NO: 5305 - DNA, 129 bp, Artificial Sequence
  Description of Artificial Sequence: Synthetic antibody
accagggacacgtccatcagcacagcctacatggagctgagcagcctcagatctgacgacacggtcgtgttttactgtgcgagatcgcggcctagtgtgggcggtgcttttgatatctggggccaaggg

SEQ ID NO: 5306 - protein, 43 aa, Artificial Sequence
  Description of Artificial Sequence: Synthetic antibody
TRDTSISTAYMELSSLRSDDTVVFYCARSRPSVGGAFDIWGQG

SEQ ID NO: 5307 - protein, 21 aa, Artificial Sequence
  Description of Artificial Sequence: Synthetic antibody
CARLFYYDSSAYYLGYYFDYW

SEQ ID NO: 5308 - DNA, 129 bp, Artificial Sequence
  Description of Artificial Sequence: Synthetic antibody
tactccatgtatctgcaaatgaacaccctgagagacgaggacacggctgtgtattactgtgcgagactgttttactatgatagtagtgcttattacttgggttactactttgactactggggccaggga

SEQ ID NO: 5309 - protein, 43 aa, Artificial Sequence
  Description of Artificial Sequence: Synthetic antibody
YSMYLQMNTLRDEDTAVYYCARLFYYDSSAYYLGYYFDYWGQG

SEQ ID NO: 5310 - DNA, 129 bp, Artificial Sequence
  Description of Artificial Sequence: Synthetic antibody
aactccctgtatctgcaaatgaacaccctgagagacgaggacacggctgtgtattactgtgcgagactgttttactatgatagtagtgcttattacttgggttactactttgactactggggccaggga

SEQ ID NO: 5311 - protein, 43 aa, Artificial Sequence
  Description of Artificial Sequence: Synthetic antibody
NSLYLQMNTLRDEDTAVYYCARLFYYDSSAYYLGYYFDYWGQG

SEQ ID NO: 5312 - protein, 20 aa, Artificial Sequence
  Description of Artificial Sequence: Synthetic antibody
CATDYYDSSGYTWGYGMDVW

SEQ ID NO: 5313 - DNA, 129 bp, Artificial Sequence
  Description of Artificial Sequence: Synthetic antibody
caagaactcctgtatctgcaaatgaacagtctgagagctgaggacacggccttgtattactgtgccacagattactatgatagtagtggttacacgtgggggtacggtatggacgtctggggccaaggg

SEQ ID NO: 5314 - protein, 43 aa, Artificial Sequence
  Description of Artificial Sequence: Synthetic antibody
QELLYLQMNSLRAEDTALYYCATDYYDSSGYTWGYGMDVWGQG

SEQ ID NO: 5315 - DNA, 129 bp, Artificial Sequence
  Description of Artificial Sequence: Synthetic antibody
aagaactccctgtatctgcaaatgaacagtctgagagctgaggacacggccttgtattactgtgccacagattactatgatagtagtggttacacgtgggggtacggtatggacgtctggggccaaggg

SEQ ID NO: 5316 - protein, 43 aa, Artificial Sequence
  Description of Artificial Sequence: Synthetic antibody
KNSLYLQMNSLRAEDTALYYCATDYYDSSGYTWGYGMDVWGQG

SEQ ID NO: 5317 - protein, 17 aa, Artificial Sequence
  Description of Artificial Sequence: Synthetic antibody
CATDRPLTDYYYGMDVW

SEQ ID NO: 5318 - DNA, 129 bp, Artificial Sequence
  Description of Artificial Sequence: Synthetic antibody
gacacgtctacagacacagcctacatggagctgagcagcctgagatctgaggacacggccgtgtattactgtgcaacagatcgcccgcttaccgactactactacggtatggacgtctggggccaaggg

SEQ ID NO: 5319 - protein, 43 aa, Artificial Sequence
  Description of Artificial Sequence: Synthetic antibody
DTSTDTAYMELSSLRSEDTAVYYCATDRPLTDYYYGMDVWGQG

SEQ ID NO: 5320 - DNA, 129 bp, Artificial Sequence
  Description of Artificial Sequence: Synthetic antibody
gacacgtctacagacacagcctacatggagctgagcagcctgaaatctgaggacacggccgtgtattactgtgcaacagatcgcccgcttaccgactactactacggtatggacgtctggggccaaggg

SEQ ID NO: 5321 - protein, 43 aa, Artificial Sequence
  Description of Artificial Sequence: Synthetic antibody
DTSTDTAYMELSSLKSEDTAVYYCATDRPLTDYYYGMDVWGQG

SEQ ID NO: 5322 - protein, 16 aa, Artificial Sequence
  Description of Artificial Sequence: Synthetic antibody
CAKDLYYFDSSGYDYW

SEQ ID NO: 5323 - DNA, 129 bp, Artificial Sequence
  Description of Artificial Sequence: Synthetic antibody
agagatgattccaagaacacgctgtatctgcaaatgaacagtctgagagccgaggacacggccgtatattactgtgcgaaagatttatattactttgatagtagtggttatgactactggggccaggga

SEQ ID NO: 5324 - protein, 43 aa, Artificial Sequence
  Description of Artificial Sequence: Synthetic antibody
RDDSKNTLYLQMNSLRAEDTAVYYCAKDLYYFDSSGYDYWGQG

SEQ ID NO: 5325 - DNA, 129 bp, Artificial Sequence
  Description of Artificial Sequence: Synthetic antibody
agagatgattccaagaacacgctgtatctgcaaatgaacagcctgagagccgaggacacggccgtatattactgtgcgaaagatttatattactttgatagtagtggttatgactactggggccaggga

SEQ ID NO: 5326 - protein, 14 aa, Artificial Sequence
  Description of Artificial Sequence: Synthetic antibody
CAKARSGYDRFDYW

SEQ ID NO: 5327 - DNA, 129 bp, Artificial Sequence
  Description of Artificial Sequence: Synthetic antibody
atctccatacacaattccaagaacacgctgtatctgcaaatgaacagcctgagagccgaggacacggccgtatattactgtgcgaaagcccgcagtggctacgacagatttgactactggggccaggga

SEQ ID NO: 5328 - protein, 43 aa, Artificial Sequence
  Description of Artificial Sequence: Synthetic antibody
ISIHNSKNTLYLQMNSLRAEDTAVYYCAKARSGYDRFDYWGQG

SEQ ID NO: 5329 - DNA, 129 bp, Artificial Sequence
  Description of Artificial Sequence: Synthetic antibody
atctccagagacaattccaagaacacgctgtatctgcaaatgaacagcctgagagccgaggacacggccgtatattactgtgcgaaagcccgcagtggctacgacagatttgactactggggccaggga

SEQ ID NO: 5330 - protein, 43 aa, Artificial Sequence
  Description of Artificial Sequence: Synthetic antibody
ISRDNSKNTLYLQMNSLRAEDTAVYYCAKARSGYDRFDYWGQG

SEQ ID NO: 5331 - protein, 15 aa, Artificial Sequence
  Description of Artificial Sequence: Synthetic antibody
CAKGEGSSWYWFDPW

SEQ ID NO: 5332 - DNA, 129 bp, Artificial Sequence
  Description of Artificial Sequence: Synthetic antibody
tccagagacaattccaagaacacgctgtatctgcaaatgaacagcctgagagccgaggacacggctgtgtattactgtgcgaaaggtgagggcagcagctggtactggttcgacccctggggccaggga

SEQ ID NO: 5333 - protein, 43 aa, Artificial Sequence
  Description of Artificial Sequence: Synthetic antibody
SRDNSKNTLYLQMNSLRAEDTAVYYCAKGEGSSWYWFDPWGQG

SEQ ID NO: 5334 - DNA, 129 bp, Artificial Sequence
  Description of Artificial Sequence: Synthetic antibody
tacagagacaattccaagaacacgctgtatctgcaaatgaaccgcctgagagccgaggacacggctgtgtattactgtgcgaaaggtgagggcagcagctggtactggttcgacccctggggccaggga

SEQ ID NO: 5335 - protein, 43 aa, Artificial Sequence
  Description of Artificial Sequence: Synthetic antibody
YRDNSKNTLYLQMNRLRAEDTAVYYCAKGEGSSWYWFDPWGQG

SEQ ID NO: 5336 - protein, 16 aa, Artificial Sequence
  Description of Artificial Sequence: Synthetic antibody
CAHTPPTTVTTMFDYW

SEQ ID NO: 5337 - DNA, 129 bp, Artificial Sequence
  Description of Artificial Sequence: Synthetic antibody
caaggacacctccaaaaccaggtggtccttacaatgaccaacatggaccctgtggacacagccacatattactgtgcacacaccccgccgactacggtgactacaatgtttgactactggggccaggga

SEQ ID NO: 5338 - protein, 43 aa, Artificial Sequence
  Description of Artificial Sequence: Synthetic antibody
QGHLQNQVVLTMTNMDPVDTATYYCAHTPPTTVTTMFDYWGQG

SEQ ID NO: 5339 - DNA, 129 bp, Artificial Sequence
  Description of Artificial Sequence: Synthetic antibody
aaggacacctccaaaaaccaggtggtccttacaatgaccaacatggaccctgtggacacagccacatattactgtgcacacaccccgccgactacggtgactacaatgtttgactactggggccaggga

SEQ ID NO: 5340 - protein, 43 aa, Artificial Sequence
  Description of Artificial Sequence: Synthetic antibody
KDTSKNQVVLTMTNMDPVDTATYYCAHTPPTTVTTMFDYWGQG

SEQ ID NO: 5341 - protein, 11 aa, Artificial Sequence
  Description of Artificial Sequence: Synthetic antibody
CAKGPAAGTDW

SEQ ID NO: 5342 - DNA, 129 bp, Artificial Sequence
  Description of Artificial Sequence: Synthetic antibody
cggttcaccatctccagatataattccaagaacacgctgtatctgcaaatgaacagcctgagagccgaggacacggccgtatattactgtgcgaaaggcccagcagctggtaccgactggggccaggga

SEQ ID NO: 5343 - protein, 43 aa, Artificial Sequence
  Description of Artificial Sequence: Synthetic antibody
RFTISRYNSKNTLYLQMNSLRAEDTAVYYCAKGPAAGTDWGQG

SEQ ID NO: 5344 - DNA, 129 bp, Artificial Sequence
  Description of Artificial Sequence: Synthetic antibody
cggttcaccatctccagagataattccaagaacacgctgtatctgcaaatgaacagcctgagagccgaggacacggccgtatattactgtgcgaaaggcccagcagctggtaccgactggggccaggga

SEQ ID NO: 5345 - protein, 43 aa, Artificial Sequence
  Description of Artificial Sequence: Synthetic antibody
RFTISRDNSKNTLYLQMNSLRAEDTAVYYCAKGPAAGTDWGQG

SEQ ID NO: 5346 - protein, 17 aa, Artificial Sequence
  Description of Artificial Sequence: Synthetic antibody
CAKDGSYGSQPNLFDPW

SEQ ID NO: 5347 - DNA, 129 bp, Artificial Sequence
  Description of Artificial Sequence: Synthetic antibody
gacaacgccaagaactccgtgtatttgcaaatgaacagtctgagagctgaggacacggccttgtattattgtgcaaaagatggatcctatgggtcccaaccgaacttattcgacccctggggccaggga

SEQ ID NO: 5348 - protein, 43 aa, Artificial Sequence
  Description of Artificial Sequence: Synthetic antibody
DNAKNSVYLQMNSLRAEDTALYYCAKDGSYGSQPNLFDPWGQG

SEQ ID NO: 5349 - DNA, 129 bp, Artificial Sequence
  Description of Artificial Sequence: Synthetic antibody
gacaacgccaagaactccgtgtatttgcaaatgaacagtctgagagctgaggacacggccttatattattgtgcaaaagatggatcctatgggtcccaaccgaacttattcgacccctggggccaggga

SEQ ID NO: 5350 - protein, 25 aa, Artificial Sequence
  Description of Artificial Sequence: Synthetic antibody
CARDSGEEYCSGGSCYYYYYGMDVW

SEQ ID NO: 5351 - DNA, 129 bp, Artificial Sequence
  Description of Artificial Sequence: Synthetic antibody
ctgcaaatgaacagcctgaaaaccgaggacacggccgtgtattactgtgctagagatagcggtgaggaatattgtagtggtggtagctgctactactactactacggtatggacgtctggggccaaggg

SEQ ID NO: 5352 - protein, 43 aa, Artificial Sequence
  Description of Artificial Sequence: Synthetic antibody
LQMNSLKTEDTAVYYCARDSGEEYCSGGSCYYYYYGMDVWGQG

SEQ ID NO: 5353 - DNA, 129 bp, Artificial Sequence
  Description of Artificial Sequence: Synthetic antibody
ctgaaaatgaactgcctgaaaaccgaggacacggccgtgtattactgtgctagagatagcggtgaggaatattgtagtggtggtagctgctactactactactacggtatggacgtctggggccaaggg

SEQ ID NO: 5354 - protein, 43 aa, Artificial Sequence
  Description of Artificial Sequence: Synthetic antibody
LKMNCLKTEDTAVYYCARDSGEEYCSGGSCYYYYYGMDVWGQG

SEQ ID NO: 5355 - protein, 18 aa, Artificial Sequence
  Description of Artificial Sequence: Synthetic antibody
CTSRITMVTNRTELFDYW

SEQ ID NO: 5356 - DNA, 129 bp, Artificial Sequence
  Description of Artificial Sequence: Synthetic antibody
ttttcaaagaacacggcgtatctgcaaatgaacagcctgaaaaccgaggacacggccgtgtattactgtactagccgtattactatggttactaaccgcacggaattgtttgactactggggccaggga

SEQ ID NO: 5357 - protein, 43 aa, Artificial Sequence
  Description of Artificial Sequence: Synthetic antibody
FSKNTAYLQMNSLKTEDTAVYYCTSRITMVTNRTELFDYWGQG

SEQ ID NO: 5358 - DNA, 129 bp, Artificial Sequence
  Description of Artificial Sequence: Synthetic antibody
gattcaaagaacacggcgtatctgcaaatgaacagcctgaaaaccgaggacacggccgtgtattactgtactagccgtattactatggttactaaccgcacggaattgtttgactactggggccaggga

SEQ ID NO: 5359 - protein, 43 aa, Artificial Sequence
  Description of Artificial Sequence: Synthetic antibody
DSKNTAYLQMNSLKTEDTAVYYCTSRITMVTNRTELFDYWGQG

SEQ ID NO: 5360 - protein, 17 aa, Artificial Sequence
  Description of Artificial Sequence: Synthetic antibody
CAREAHSSTWDNNFDLW

SEQ ID NO: 5361 - DNA, 129 bp, Artificial Sequence
  Description of Artificial Sequence: Synthetic antibody
gacaacgccaagaacacgctgtatctgcagatgaacagtctgagaaccggggacacggctgtttatcactgtgcaagagaggcgcatagcagcacctgggataacaactttgacctctggggccaggga

SEQ ID NO: 5362 - protein, 43 aa, Artificial Sequence
  Description of Artificial Sequence: Synthetic antibody
DNAKNTLYLQMNSLRTGDTAVYHCAREAHSSTWDNNFDLWGQG

SEQ ID NO: 5363 - DNA, 129 bp, Artificial Sequence
  Description of Artificial Sequence: Synthetic antibody
gacaacgccaagaacacgccgtatctgcagatgaacagtctgagaaccggggacacggctgtttatcactgtgcaagagaggcgcatagcagcacctgggataacaactttgacctctggggccaggga

SEQ ID NO: 5364 - protein, 43 aa, Artificial Sequence
  Description of Artificial Sequence: Synthetic antibody
DNAKNTPYLQMNSLRTGDTAVYHCAREAHSSTWDNNFDLWGQG

SEQ ID NO: 5365 - protein, 13 aa, Artificial Sequence
  Description of Artificial Sequence: Synthetic antibody
CARASVPYYYDYW

SEQ ID NO: 5366 - DNA, 129 bp, Artificial Sequence
  Description of Artificial Sequence: Synthetic antibody
accatctccatacacaattccaagaacacgctgtatcttcaaatgaacagcctgagagccgaggacacggccgtgtattactgtgcgagagccagtgtaccttactactatgactactggggccaggga

SEQ ID NO: 5367 - protein, 43 aa, Artificial Sequence
  Description of Artificial Sequence: Synthetic antibody
TISIHNSKNTLYLQMNSLRAEDTAVYYCARASVPYYYDYWGQG

SEQ ID NO: 5368 - DNA, 129 bp, Artificial Sequence
  Description of Artificial Sequence: Synthetic antibody
accatctccagagacaattccaagaacacgctgtatcttcaaatgaacagcctgagagccgaggacacggccgtgtattactgtgcgagagccagtgtaccttactactatgactactggggccaggga

SEQ ID NO: 5369 - protein, 43 aa, Artificial Sequence
  Description of Artificial Sequence: Synthetic antibody
TISRDNSKNTLYLQMNSLRAEDTAVYYCARASVPYYYDYWGQG

SEQ ID NO: 5370 - protein, 21 aa, Artificial Sequence
  Description of Artificial Sequence: Synthetic antibody
CARVISGSYYLDYYYYGMDVW

SEQ ID NO: 5371 - DNA, 129 bp, Artificial Sequence
  Description of Artificial Sequence: Synthetic antibody
tgcacagcctacttggagctgaggagcctgagatctgacgacacggccgtgtattactgtgcgagagtaattagtgggagctactacttagactactactactacggtatggacgtctggggccaaggg

SEQ ID NO: 5372 - protein, 43 aa, Artificial Sequence
  Description of Artificial Sequence: Synthetic antibody
CTAYLELRSLRSDDTAVYYCARVISGSYYLDYYYYGMDVWGQG

SEQ ID NO: 5373 - DNA, 129 bp, Artificial Sequence
  Description of Artificial Sequence: Synthetic antibody
agcacagcctacatggagctgaggagcctgagatctgacgacacggccgtgtattactgtgcgagagtaattagtgggagctactacttagactactactactacggtatggacgtctggggccaaggg

SEQ ID NO: 5374 - protein, 43 aa, Artificial Sequence
  Description of Artificial Sequence: Synthetic antibody
STAYMELRSLRSDDTAVYYCARVISGSYYLDYYYYGMDVWGQG

SEQ ID NO: 5375 - protein, 20 aa, Artificial Sequence
  Description of Artificial Sequence: Synthetic antibody
CARDHQEMATITWYDAFDIW

SEQ ID NO: 5376 - DNA, 129 bp, Artificial Sequence
  Description of Artificial Sequence: Synthetic antibody
aagaacacgctgtatctgcaaatgaacagtctgagagccgaggacacggctgtgtattactgtgcaagagatcatcaggagatggctacaattacctggtatgatgcttttgatatctggggccaaggg

SEQ ID NO: 5377 - protein, 43 aa, Artificial Sequence
  Description of Artificial Sequence: Synthetic antibody
KNTLYLQMNSLRAEDTAVYYCARDHQEMATITWYDAFDIWGQG

SEQ ID NO: 5378 - DNA, 129 bp, Artificial Sequence
  Description of Artificial Sequence: Synthetic antibody
aagaacacgctgtatctgcaaatgaacagtctgagagccgaggacacggctgcgtattactgtgcaagagatcatcaggagatggctacaattacctggtatgatgcttttgatatctggggccaaggg

SEQ ID NO: 5379 - protein, 43 aa, Artificial Sequence
  Description of Artificial Sequence: Synthetic antibody
KNTLYLQMNSLRAEDTAAYYCARDHQEMATITWYDAFDIWGQG

SEQ ID NO: 5380 - protein, 22 aa, Artificial Sequence
  Description of Artificial Sequence: Synthetic antibody
CAKDIGGSSGWYDELGWYFDLW

SEQ ID NO: 5381 - DNA, 129 bp, Artificial Sequence
  Description of Artificial Sequence: Synthetic antibody
tccctgtatctgcaaatgaacagtctgagagctgaggacacggccttgtattactgtgcaaaagatataggaggtagcagtggctggtacgatgaactgggctggtacttcgatctctggggccgtggc

SEQ ID NO: 5382 - protein, 43 aa, Artificial Sequence
  Description of Artificial Sequence: Synthetic antibody
SLYLQMNSLRAEDTALYYCAKDIGGSSGWYDELGWYFDLWGRG

SEQ ID NO: 5383 - DNA, 129 bp, Artificial Sequence
  Description of Artificial Sequence: Synthetic antibody
tacatgtatctgcaaatgaacagtctgagagctgaggacacggccttgtattactgtgcaaaagatataggaggtagcagtggctggtacgatgaactgggctggtacttcgatctctggggccgtggc

SEQ ID NO: 5384 - protein, 43 aa, Artificial Sequence
  Description of Artificial Sequence: Synthetic antibody
YMYLQMNSLRAEDTALYYCAKDIGGSSGWYDELGWYFDLWGRG

SEQ ID NO: 5385 - protein, 22 aa, Artificial Sequence
  Description of Artificial Sequence: Synthetic antibody
CARGNDGSSGSHFYYYYGLDVW

SEQ ID NO: 5386 - DNA, 129 bp, Artificial Sequence
  Description of Artificial Sequence: Synthetic antibody
caattctccctgaaagtgagttctgtgaccgccgcggacacggctgtttattgctgtgcgagaggcaatgacggcagcagcgggtctcatttttattactactatggcctggacgtctggggccagggg

SEQ ID NO: 5387 - protein, 43 aa, Artificial Sequence
  Description of Artificial Sequence: Synthetic antibody
QFSLKVSSVTAADTAVYCCARGNDGSSGSHFYYYYGLDVWGQG

SEQ ID NO: 5388 - DNA, 129 bp, Artificial Sequence
  Description of Artificial Sequence: Synthetic antibody
caattctccctgaaagtgagttctgtgaccgccgcggacacggctgtttattactgtgcgagaggcaatgacggcagcagcgggtctcatttttattactactatggcctggacgtctggggccagggg

SEQ ID NO: 5389 - protein, 43 aa, Artificial Sequence
  Description of Artificial Sequence: Synthetic antibody
QFSLKVSSVTAADTAVYYCARGNDGSSGSHFYYYYGLDVWGQG

SEQ ID NO: 5390 - protein, 17 aa, Artificial Sequence
  Description of Artificial Sequence: Synthetic antibody
CAKDDGVATITSYFDYW

SEQ ID NO: 5391 - DNA, 129 bp, Artificial Sequence
  Description of Artificial Sequence: Synthetic antibody
gacaacagcaaaaactccctgtatctgcaaatgaacagtctgagaactgaggacaccgccttgtattactgtgcaaaagacgacggggtggctacaattactagctactttgactactggggccaggga

SEQ ID NO: 5392 - protein, 43 aa, Artificial Sequence
  Description of Artificial Sequence: Synthetic antibody
DNSKNSLYLQMNSLRTEDTALYYCAKDDGVATITSYFDYWGQG

SEQ ID NO: 5393 - DNA, 129 bp, Artificial Sequence
  Description of Artificial Sequence: Synthetic antibody
gacaacaccaaaaactccctgtatctgcaaatgaacagtctgagaactgaggacaccgccttgtattactgtgcaaaagacgacggggtggctacaattactagctactttgactactggggccaggga

SEQ ID NO: 5394 - protein, 43 aa, Artificial Sequence
  Description of Artificial Sequence: Synthetic antibody
DNTKNSLYLQMNSLRTEDTALYYCAKDDGVATITSYFDYWGQG

SEQ ID NO: 5395 - protein, 22 aa, Artificial Sequence
  Description of Artificial Sequence: Synthetic antibody
CAKEGYYDILTGYFWQGLFDYW

SEQ ID NO: 5396 - DNA, 129 bp, Artificial Sequence
  Description of Artificial Sequence: Synthetic antibody
tcgatgtatctgcaaatgaacagcctgagagccgaggacacggccgtatattactgtgcgaaagaagggtattacgatattttgactggttatttctggcaaggcctctttgactactggggccaggga

SEQ ID NO: 5397 - protein, 43 aa, Artificial Sequence
  Description of Artificial Sequence: Synthetic antibody
SMYLQMNSLRAEDTAVYYCAKEGYYDILTGYFWQGLFDYWGQG

SEQ ID NO: 5398 - DNA, 129 bp, Artificial Sequence
  Description of Artificial Sequence: Synthetic antibody
acgctgtatctgcaaatgaacagcctgagagccgaggacacggccgtatattactgtgcgaaagaagggtattacgatattttgactggttatttctggcaaggcctctttgactactggggccaggga

SEQ ID NO: 5399 - protein, 43 aa, Artificial Sequence
  Description of Artificial Sequence: Synthetic antibody
TLYLQMNSLRAEDTAVYYCAKEGYYDILTGYFWQGLFDYWGQG

SEQ ID NO: 5400 - protein, 19 aa, Artificial Sequence
  Description of Artificial Sequence: Synthetic antibody
CAKGRGPTMTTAFNRFDPW

SEQ ID NO: 5401 - DNA, 129 bp, Artificial Sequence
  Description of Artificial Sequence: Synthetic antibody
gccaagaactccttgtttctgcaaatggacagtctgcgagttgaggacacggccttctattactgtgcaaaaggacggggacctaccatgaccactgcttttaaccggttcgacccctggggccaggga

SEQ ID NO: 5402 - protein, 43 aa, Artificial Sequence
  Description of Artificial Sequence: Synthetic antibody
AKNSLFLQMDSLRVEDTAFYYCAKGRGPTMTTAFNRFDPWGQG

SEQ ID NO: 5403 - DNA, 129 bp, Artificial Sequence
  Description of Artificial Sequence: Synthetic antibody
gccaagaactccctgtttctgcaaatggacagtctgcgagttgaggacacggccctctattactgtgcaaaaggacggggacctaccatgaccactgcttttaaccggttcgacccctggggccaggga

SEQ ID NO: 5404 - protein, 43 aa, Artificial Sequence
  Description of Artificial Sequence: Synthetic antibody
AKNSLFLQMDSLRVEDTALYYCAKGRGPTMTTAFNRFDPWGQG

SEQ ID NO: 5405 - protein, 14 aa, Artificial Sequence
  Description of Artificial Sequence: Synthetic antibody
CARKLMGTQPFDYW

SEQ ID NO: 5406 - DNA, 129 bp, Artificial Sequence
  Description of Artificial Sequence: Synthetic antibody
atgaccagggacacgtccatcagcacagcctacatggagctcagcagcctgagatctggcgacacggccgtgtattactgtgcgaggaaactaatgggaacacaacccttcgactactggggccaggga

SEQ ID NO: 5407 - protein, 43 aa, Artificial Sequence
  Description of Artificial Sequence: Synthetic antibody
MTRDTSISTAYMELSSLRSGDTAVYYCARKLMGTQPFDYWGQG

SEQ ID NO: 5408 - DNA, 129 bp, Artificial Sequence
  Description of Artificial Sequence: Synthetic antibody
atgaccagggacacgtccatcagcacagcctacatggagctcagcagcctgagatctgacgacacggccgtgtattactgtgcgaggaaactaatgggaacacaaccctttgactactggggccaggga

SEQ ID NO: 5409 - protein, 43 aa, Artificial Sequence
  Description of Artificial Sequence: Synthetic antibody
MTRDTSISTAYMELSSLRSDDTAVYYCARKLMGTQPFDYWGQG

SEQ ID NO: 5410 - protein, 12 aa, Artificial Sequence
  Description of Artificial Sequence: Synthetic antibody
CAKEVRGVIDYW

SEQ ID NO: 5411 - DNA, 129 bp, Artificial Sequence
  Description of Artificial Sequence: Synthetic antibody
ttcaccatctccagatataattccaagaacacgctgtatctgcaaatgaacagcctgagagccgaggacacggccgtatattactgtgcgaaagaggttcggggagttattgactactggggccaggga

SEQ ID NO: 5412 - protein, 43 aa, Artificial Sequence
  Description of Artificial Sequence: Synthetic antibody
FTISRYNSKNTLYLQMNSLRAEDTAVYYCAKEVRGVIDYWGQG

SEQ ID NO: 5413 - DNA, 129 bp, Artificial Sequence
  Description of Artificial Sequence: Synthetic antibody
ttcaccatctccagagataattccaagaacacgctgtatctgcaaatgaacagcctgagagccgaggacacggccgtatattactgtgcgaaagaggttcggggagttattgactactggggccaggga

SEQ ID NO: 5414 - protein, 43 aa, Artificial Sequence
  Description of Artificial Sequence: Synthetic antibody
FTISRDNSKNTLYLQMNSLRAEDTAVYYCAKEVRGVIDYWGQG

SEQ ID NO: 5415 - protein, 16 aa, Artificial Sequence
  Description of Artificial Sequence: Synthetic antibody
CVKQSSGNSYGVSDYW

SEQ ID NO: 5416 - DNA, 129 bp, Artificial Sequence
  Description of Artificial Sequence: Synthetic antibody
agatataattccaacaacacgctctacttgcaaatgaacagcctgagagccgaggacacggccgtatattactgtgtgaaacagtcgagtgggaactcctacggggtttcggactactggggccaggga

SEQ ID NO: 5417 - protein, 43 aa, Artificial Sequence
  Description of Artificial Sequence: Synthetic antibody
RYNSNNTLYLQMNSLRAEDTAVYYCVKQSSGNSYGVSDYWGQG

SEQ ID NO: 5418 - DNA, 129 bp, Artificial Sequence
  Description of Artificial Sequence: Synthetic antibody
agagataattccaagaacacgctctacttgcaaatgaacagcctgagagccgaggacacggccgtatattactgtgtgaaacagtcgagtgggaactcctacggggtttcggactactggggccaggga

SEQ ID NO: 5419 - protein, 43 aa, Artificial Sequence
  Description of Artificial Sequence: Synthetic antibody
RDNSKNTLYLQMNSLRAEDTAVYYCVKQSSGNSYGVSDYWGQG

SEQ ID NO: 5420 - protein, 19 aa, Artificial Sequence
  Description of Artificial Sequence: Synthetic antibody
CARPRAPTTNYYYYGMDVW

SEQ ID NO: 5421 - DNA, 129 bp, Artificial Sequence
  Description of Artificial Sequence: Synthetic antibody
tctgtcagcacggcatatctgcagatcagcagcctaaaggctgaggacactgccgtgtattactgtgcgaggccacgggcacctaccacaaactactactactacggtatggacgtctggggccaaggg

SEQ ID NO: 5422 - protein, 43 aa, Artificial Sequence
  Description of Artificial Sequence: Synthetic antibody
SVSTAYLQISSLKAEDTAVYYCARPRAPTTNYYYYGMDVWGQG

SEQ ID NO: 5423 - DNA, 129 bp, Artificial Sequence
  Description of Artificial Sequence: Synthetic antibody
tctgtcagcacggcatatctgcagatcagcagcctaaaggctgaggacactgccgtgtattactgtgcgaggccacgggcacctaccacaaactactactactacggtatggacgtctggagccaaggg

SEQ ID NO: 5424 - protein, 43 aa, Artificial Sequence
  Description of Artificial Sequence: Synthetic antibody
SVSTAYLQISSLKAEDTAVYYCARPRAPTTNYYYYGMDVWSQG

SEQ ID NO: 5425 - protein, 16 aa, Artificial Sequence
  Description of Artificial Sequence: Synthetic antibody
CAKEEGVSTWTRIENW

SEQ ID NO: 5426 - DNA, 129 bp, Artificial Sequence
  Description of Artificial Sequence: Synthetic antibody
agatataattccatgaacatgctctatctgcaaatgaacagcctgagaggcgaggacacggccgtatattactgtgcgaaagaagagggagtcagtacctggacgcggattgagaactggggccaggga

SEQ ID NO: 5427 - protein, 43 aa, Artificial Sequence
  Description of Artificial Sequence: Synthetic antibody
RYNSMNMLYLQMNSLRGEDTAVYYCAKEEGVSTWTRIENWGQG

SEQ ID NO: 5428 - DNA, 129 bp, Artificial Sequence
  Description of Artificial Sequence: Synthetic antibody
agagataattccatgaacatgctctatctgcaaatgaacagcctgagaggcgaggacacggccgtatattactgtgcgaaagaagagggagtcagtacctggacgcggattgagaactggggccaggga

SEQ ID NO: 5429 - protein, 43 aa, Artificial Sequence
  Description of Artificial Sequence: Synthetic antibody
RDNSMNMLYLQMNSLRGEDTAVYYCAKEEGVSTWTRIENWGQG

SEQ ID NO: 5430 - protein, 14 aa, Artificial Sequence
  Description of Artificial Sequence: Synthetic antibody
CASLLGGSATFDYW

SEQ ID NO: 5431 - DNA, 129 bp, Artificial Sequence
  Description of Artificial Sequence: Synthetic antibody
atctccagagacgacgccaagaactcgttgtatctgcaaatgaacagtctgagagtcgaggacacggctatgtattactgtgcaagcctactaggagggagtgccactttcgactactggggccaggga

SEQ ID NO: 5432 - protein, 43 aa, Artificial Sequence
  Description of Artificial Sequence: Synthetic antibody
ISRDDAKNSLYLQMNSLRVEDTAMYYCASLLGGSATFDYWGQG

SEQ ID NO: 5433 - DNA, 129 bp, Artificial Sequence
  Description of Artificial Sequence: Synthetic antibody
atctccagagacaacgccaagaactcgttgtatctgcaaatgaacagtctgagagtcgaggacacggctatgtattactgtgcaagcctactaggagggagtgccactttcgactactggggccaggga

SEQ ID NO: 5434 - protein, 43 aa, Artificial Sequence
  Description of Artificial Sequence: Synthetic antibody
ISRDNAKNSLYLQMNSLRVEDTAMYYCASLLGGSATFDYWGQG

SEQ ID NO: 5435 - protein, 21 aa, Artificial Sequence
  Description of Artificial Sequence: Synthetic antibody
CAREGYSYYYDSSGQNWFDPW

SEQ ID NO: 5436 - DNA, 129 bp, Artificial Sequence
  Description of Artificial Sequence: Synthetic antibody
tgcacagcctacttggagctgagcagcctgagatctgaggacacggccgtgtattactgtgcgagagagggctactcgtattactatgatagtagtggtcagaactggttcgacccctggggccaggga

SEQ ID NO: 5437 - protein, 43 aa, Artificial Sequence
  Description of Artificial Sequence: Synthetic antibody
CTAYLELSSLRSEDTAVYYCAREGYSYYYDSSGQNWFDPWGQG

SEQ ID NO: 5438 - DNA, 129 bp, Artificial Sequence
  Description of Artificial Sequence: Synthetic antibody
agcacagcctacatggagctgagcagcctgagatctgaggacacggccgtgtattactgtgcgagagagggctactcgtattactatgatagtagtggtcagaactggttcgacccctggggccaggga

SEQ ID NO: 5439 - protein, 43 aa, Artificial Sequence
  Description of Artificial Sequence: Synthetic antibody
STAYMELSSLRSEDTAVYYCAREGYSYYYDSSGQNWFDPWGQG

SEQ ID NO: 5440 - protein, 15 aa, Artificial Sequence
  Description of Artificial Sequence: Synthetic antibody
CAKLMGGGDYYFDYW

SEQ ID NO: 5441 - DNA, 129 bp, Artificial Sequence
  Description of Artificial Sequence: Synthetic antibody
tccagagacaattccaagaacacgctgtatctgcaaatgaacagcctgagagccgaggacacggccgtatattactgtgcgaaattgatgggaggtggtgactactactttgactactggggccaggga

SEQ ID NO: 5442 - protein, 43 aa, Artificial Sequence
  Description of Artificial Sequence: Synthetic antibody
SRDNSKNTLYLQMNSLRAEDTAVYYCAKLMGGGDYYFDYWGQG

SEQ ID NO: 5443 - DNA, 129 bp, Artificial Sequence
  Description of Artificial Sequence: Synthetic antibody
tccacagacaattccaacaacacgctgtatctgcaaatgaacagcctgagagccgaggacacggccgtatattactgtgcgaaattgatgggaggtggtgactactactttgactactggggccaggga

SEQ ID NO: 5444 - protein, 43 aa, Artificial Sequence
  Description of Artificial Sequence: Synthetic antibody
STDNSNNTLYLQMNSLRAEDTAVYYCAKLMGGGDYYFDYWGQG

SEQ ID NO: 5445 - protein, 23 aa, Artificial Sequence
  Description of Artificial Sequence: Synthetic antibody
CAKARYSSSWYETRDYYYGMDVW

SEQ ID NO: 5446 - DNA, 129 bp, Artificial Sequence
  Description of Artificial Sequence: Synthetic antibody
ctgtatctgcaaatgaacagcctgagagccgaggacacggccgtatattactgtgcgaaagcgaggtatagcagcagctggtacgaaacccgtgactactactacggtatggacgtctggggccaaggg

SEQ ID NO: 5447 - protein, 43 aa, Artificial Sequence
  Description of Artificial Sequence: Synthetic antibody
LYLQMNSLRAEDTAVYYCAKARYSSSWYETRDYYYGMDVWGQG

SEQ ID NO: 5448 - DNA, 129 bp, Artificial Sequence
  Description of Artificial Sequence: Synthetic antibody
ctgcatctgcaaatgaacagcctgagagccgaggacacggccgtatattactgtgcgaaagcgaggtatagcagcagctggtacgaaacccgtgactactactacggtatggacgtctggggccaaggg

SEQ ID NO: 5449 - protein, 43 aa, Artificial Sequence
  Description of Artificial Sequence: Synthetic antibody
LHLQMNSLRAEDTAVYYCAKARYSSSWYETRDYYYGMDVWGQG

SEQ ID NO: 5450 - protein, 22 aa, Artificial Sequence
  Description of Artificial Sequence: Synthetic antibody
CAKDGTMVRERRPFYYYGMDVW

SEQ ID NO: 5451 - DNA, 129 bp, Artificial Sequence
  Description of Artificial Sequence: Synthetic antibody
tcgatgtatctgcaaatgaacagcctgagagccgaggacacggctgtgtattactgtgcgaaagatgggactatggttcgggagcgccgtcctttctactactacggtatggacgtctggggccaaggg

SEQ ID NO: 5452 - protein, 43 aa, Artificial Sequence
  Description of Artificial Sequence: Synthetic antibody
SMYLQMNSLRAEDTAVYYCAKDGTMVRERRPFYYYGMDVWGQG

SEQ ID NO: 5453 - DNA, 129 bp, Artificial Sequence
  Description of Artificial Sequence: Synthetic antibody
acgctgtatctgcaaatgaacagcctgagagccgaggacacggctgtgtattactgtgcgaaagatgggactatggttcgggagcgccgtcctttctactactacggtatggacgtctggggccaaggg

SEQ ID NO: 5454 - protein, 43 aa, Artificial Sequence
  Description of Artificial Sequence: Synthetic antibody
TLYLQMNSLRAEDTAVYYCAKDGTMVRERRPFYYYGMDVWGQG

SEQ ID NO: 5455 - protein, 21 aa, Artificial Sequence
  Description of Artificial Sequence: Synthetic antibody
CAKAPPNRPGGRAQFRYFDYW

SEQ ID NO: 5456 - DNA, 129 bp, Artificial Sequence
  Description of Artificial Sequence: Synthetic antibody
aacacgctgtatctgcaaatgaacagcctgagagccgaggacacggccgtatattactgtgcgaaagcaccccccaataggccgggtggtcgggctcagttccgctactttgactactggggccaggga

SEQ ID NO: 5457 - protein, 43 aa, Artificial Sequence
  Description of Artificial Sequence: Synthetic antibody
NTLYLQMNSLRAEDTAVYYCAKAPPNRPGGRAQFRYFDYWGQG

SEQ ID NO: 5458 - protein, 16 aa, Artificial Sequence
  Description of Artificial Sequence: Synthetic antibody
CARHSGSSWYDAFDIW

SEQ ID NO: 5459 - DNA, 129 bp, Artificial Sequence
  Description of Artificial Sequence: Synthetic antibody
gtagacacgtccaagaaccagttctccctgaagctgagctctgtgaccgccgcagacacggctgtgtattactgtgcgagacattcgggcagcagctggtacgatgcttttgatatctggggtcaaggg

SEQ ID NO: 5460 - protein, 43 aa, Artificial Sequence
  Description of Artificial Sequence: Synthetic antibody
VDTSKNQFSLKLSSVTAADTAVYYCARHSGSSWYDAFDIWGQG

SEQ ID NO: 5461 - DNA, 129 bp, Artificial Sequence
  Description of Artificial Sequence: Synthetic antibody
gtagacacgtccaagaaccagttctccctgaagctgagctctgtgaccgccgcagacacggctgtgtattactgtgcgagacattcgggcagcagctggtacgatgcttttgatatctggggccaaggg

SEQ ID NO: 5462 - protein, 16 aa, Artificial Sequence
  Description of Artificial Sequence: Synthetic antibody
CAKVGYYDSSGYFDYW

SEQ ID NO: 5463 - DNA, 129 bp, Artificial Sequence
  Description of Artificial Sequence: Synthetic antibody
agagataattccaagaacacgctgtatctgcaaatgaacagcctgagagccgaggacacggtcgtatattactgtgcgaaagtaggctactatgatagtagtggttattttgactactggggccaggga

SEQ ID NO: 5464 - protein, 43 aa, Artificial Sequence
  Description of Artificial Sequence: Synthetic antibody
RDNSKNTLYLQMNSLRAEDTVVYYCAKVGYYDSSGYFDYWGQG

SEQ ID NO: 5465 - DNA, 129 bp, Artificial Sequence
  Description of Artificial Sequence: Synthetic antibody
agagataattccaagaacacgctgtatctgcaaatgaacagcctgagagccgaggacacggccgtatattactgtgcgaaagtaggctactatgatagtagtggttattttgactactggggccaggga

SEQ ID NO: 5466 - protein, 43 aa, Artificial Sequence
  Description of Artificial Sequence: Synthetic antibody
RDNSKNTLYLQMNSLRAEDTAVYYCAKVGYYDSSGYFDYWGQG

SEQ ID NO: 5467 - protein, 10 aa, Artificial Sequence
  Description of Artificial Sequence: Synthetic antibody
CAKEGRSDYW

SEQ ID NO: 5468 - DNA, 129 bp, Artificial Sequence
  Description of Artificial Sequence: Synthetic antibody
ggccgattcaccatctccagagacaacgccaagaactccctgtatctgcaaatgaacagtctgagagctgaggacacggccttgtattactgtgcaaaagagggacgttcagactactggggccaggga

SEQ ID NO: 5469 - protein, 43 aa, Artificial Sequence
  Description of Artificial Sequence: Synthetic antibody
GRFTISRDNAKNSLYLQMNSLRAEDTALYYCAKEGRSDYWGQG

SEQ ID NO: 5470 - DNA, 129 bp, Artificial Sequence
  Description of Artificial Sequence: Synthetic antibody
ggccgattcaccatctccagagacaacgccaagaactccctgtatctgcaaatgaacagtctgagagctgaggacacggccttgtattactgcgcaaaagagggacgttcagactactggggccaggga

SEQ ID NO: 5471 - protein, 14 aa, Artificial Sequence
  Description of Artificial Sequence: Synthetic antibody
CARSYDSSGYSDYW

SEQ ID NO: 5472 - DNA, 129 bp, Artificial Sequence
  Description of Artificial Sequence: Synthetic antibody
atctcagccggcgagtccatcagcaccgcctacctgcagtggagcagcctgaaggcctcggacaccgccatgtattactgtgcgagatcctatgatagtagtggttattctgactactggggccaggga

SEQ ID NO: 5473 - protein, 43 aa, Artificial Sequence
  Description of Artificial Sequence: Synthetic antibody
ISAGESISTAYLQWSSLKASDTAMYYCARSYDSSGYSDYWGQG

SEQ ID NO: 5474 - DNA, 129 bp, Artificial Sequence
  Description of Artificial Sequence: Synthetic antibody
atctcagccgacaagtccatcagcaccgcctacctgcagtggagcagcctgaaggcctcggacaccgccatgtattactgtgcgagatcctatgatagtagtggttattctgactactggggccaggga

SEQ ID NO: 5475 - protein, 43 aa, Artificial Sequence
  Description of Artificial Sequence: Synthetic antibody
ISADKSISTAYLQWSSLKASDTAMYYCARSYDSSGYSDYWGQG

SEQ ID NO: 5476 - protein, 19 aa, Artificial Sequence
  Description of Artificial Sequence: Synthetic antibody
CARGPVGAAVVAATRFDPW

SEQ ID NO: 5477 - DNA, 129 bp, Artificial Sequence
  Description of Artificial Sequence: Synthetic antibody
tccgcgaacacggcctacatggaattgagaggcctgacatctgaagacacggctatctttttctgtgcgagagggcccgtgggtgcagcggtggtagctgccactcgcttcgacccgtggggccaggga

SEQ ID NO: 5478 - protein, 43 aa, Artificial Sequence
  Description of Artificial Sequence: Synthetic antibody
SANTAYMELRGLTSEDTAIFFCARGPVGAAVVAATRFDPWGQG

SEQ ID NO: 5479 - DNA, 129 bp, Artificial Sequence
  Description of Artificial Sequence: Synthetic antibody
tccgcgaacacggcctacatggaattgagaggcctgaaatctgaagacacgggtatctttttctgtgcgagagggcccgtgggtgcagcggtggtagctgccactcgcttcgacccgtggggccaggga

SEQ ID NO: 5480 - protein, 43 aa, Artificial Sequence
  Description of Artificial Sequence: Synthetic antibody
SANTAYMELRGLKSEDTGIFFCARGPVGAAVVAATRFDPWGQG

SEQ ID NO: 5481 - protein, 15 aa, Artificial Sequence
  Description of Artificial Sequence: Synthetic antibody
CARIYGDLYYGMDVW

SEQ ID NO: 5482 - DNA, 129 bp, Artificial Sequence
  Description of Artificial Sequence: Synthetic antibody
tcagccgacaagtccatcagcaccgcctacctgcagtggagcggcctgaaggcctcggacaccgccatgtattactgcgcgagaatctacggtgacttatactacggtatggacgtctggggccaaggg

SEQ ID NO: 5483 - protein, 43 aa, Artificial Sequence
  Description of Artificial Sequence: Synthetic antibody
SADKSISTAYLQWSGLKASDTAMYYCARIYGDLYYGMDVWGQG

SEQ ID NO: 5484 - DNA, 129 bp, Artificial Sequence
  Description of Artificial Sequence: Synthetic antibody
tcagccgacaagtccatcagcaccgcctacctgcagtggagcagcctgaaggcctcggacaccgccatgtattactgtgcgagaatctacggtgacttatactacggtatggacgtctggggccaaggg

SEQ ID NO: 5485 - protein, 43 aa, Artificial Sequence
  Description of Artificial Sequence: Synthetic antibody
SADKSISTAYLQWSSLKASDTAMYYCARIYGDLYYGMDVWGQG

SEQ ID NO: 5486 - protein, 19 aa, Artificial Sequence
  Description of Artificial Sequence: Synthetic antibody
CTTDISSPHALWFGETDYW

SEQ ID NO: 5487 - DNA, 129 bp, Artificial Sequence
  Description of Artificial Sequence: Synthetic antibody
tcaaaaaacacgctgtatctgcaaatgaacagcctgaaaaccgaggacacagccgtgtattactgtaccacagatataagctctccgcatgcactatggttcggggagactgactactggggccaggga

SEQ ID NO: 5488 - protein, 43 aa, Artificial Sequence
  Description of Artificial Sequence: Synthetic antibody
SKNTLYLQMNSLKTEDTAVYYCTTDISSPHALWFGETDYWGQG

SEQ ID NO: 5489 - DNA, 129 bp, Artificial Sequence
  Description of Artificial Sequence: Synthetic antibody
ttcaaaaacacgctgtatctgcaaatgaacagcctgaaaaccgaggacacagccgtgtattactgtaccacagatataagctctccgcatgcactatggttcggggagactgactactggggccaggga

SEQ ID NO: 5490 - protein, 43 aa, Artificial Sequence
  Description of Artificial Sequence: Synthetic antibody
FKNTLYLQMNSLKTEDTAVYYCTTDISSPHALWFGETDYWGQG

SEQ ID NO: 5491 - protein, 15 aa, Artificial Sequence
  Description of Artificial Sequence: Synthetic antibody
CAKDGLVVAGTFDYW

SEQ ID NO: 5492 - DNA, 129 bp, Artificial Sequence
  Description of Artificial Sequence: Synthetic antibody
tccagatataattccaagaacacgctgtatctgaaaatgaacagcctgagagccgaggacacggccgtatattactgtgcgaaagatggactagtggtggctggtacctttgactactggggccaggga

SEQ ID NO: 5493 - protein, 43 aa, Artificial Sequence
  Description of Artificial Sequence: Synthetic antibody
SRYNSKNTLYLKMNSLRAEDTAVYYCAKDGLVVAGTFDYWGQG

SEQ ID NO: 5494 - DNA, 129 bp, Artificial Sequence
  Description of Artificial Sequence: Synthetic antibody
tccagagataattccaagaacacgctgtatctgcaaatgaacagcctgagagccgaggacacggccgtatattactgtgcgaaagatggactagtggtggctggtacctttgactactggggccaggga

SEQ ID NO: 5495 - protein, 43 aa, Artificial Sequence
  Description of Artificial Sequence: Synthetic antibody
SRDNSKNTLYLQMNSLRAEDTAVYYCAKDGLVVAGTFDYWGQG

SEQ ID NO: 5496 - protein, 18 aa, Artificial Sequence
  Description of Artificial Sequence: Synthetic antibody
CTSAYSSSWYYYYGMDVW

SEQ ID NO: 5497 - DNA, 129 bp, Artificial Sequence
  Description of Artificial Sequence: Synthetic antibody
gattcaaccaacacggcgtatctgcaaatgaacagcctgaaaaccgaggacacggccgtgtattactgtactagcgcgtatagcagcagctggtactactactacggtatggacgtctggggccaaggg

SEQ ID NO: 5498 - protein, 43 aa, Artificial Sequence
  Description of Artificial Sequence: Synthetic antibody
DSTNTAYLQMNSLKTEDTAVYYCTSAYSSSWYYYYGMDVWGQG

SEQ ID NO: 5499 - DNA, 129 bp, Artificial Sequence
  Description of Artificial Sequence: Synthetic antibody
gattcaaagaacacggcgtatctgcaaatgaacagcctgaaaaccgaggacacggccgtgtattactgtactagcgcgtatagcagcagctggtactactactacggtatggacgtctggggccaaggg

SEQ ID NO: 5500 - protein, 43 aa, Artificial Sequence
  Description of Artificial Sequence: Synthetic antibody
DSKNTAYLQMNSLKTEDTAVYYCTSAYSSSWYYYYGMDVWGQG

SEQ ID NO: 5501 - protein, 14 aa, Artificial Sequence
  Description of Artificial Sequence: Synthetic antibody
CARLLVVYAYFDYW

SEQ ID NO: 5502 - DNA, 129 bp, Artificial Sequence
  Description of Artificial Sequence: Synthetic antibody
atctccatacacaattccaagaacacgctgtatcttcaaatgaacagcctgagagccgaggacacggccgtgtattactgtgcgagactactggtggtgtatgcctactttgactactggggccaggga

SEQ ID NO: 5503 - protein, 43 aa, Artificial Sequence
  Description of Artificial Sequence: Synthetic antibody
ISIHNSKNTLYLQMNSLRAEDTAVYYCARLLVVYAYFDYWGQG

SEQ ID NO: 5504 - DNA, 129 bp, Artificial Sequence
  Description of Artificial Sequence: Synthetic antibody
atctccagagacaattccaagaacacgctgtatcttcaaatgaacagcctgagagccgaggacacggccgtgtattactgtgcgagactactggtggtgtatgcctactttgactactggggccaggga

SEQ ID NO: 5505 - protein, 43 aa, Artificial Sequence
  Description of Artificial Sequence: Synthetic antibody
ISRDNSKNTLYLQMNSLRAEDTAVYYCARLLVVYAYFDYWGQG

SEQ ID NO: 5506 - protein, 18 aa, Artificial Sequence
  Description of Artificial Sequence: Synthetic antibody
CARQENSGSFQITHFDYW

SEQ ID NO: 5507 - DNA, 129 bp, Artificial Sequence
  Description of Artificial Sequence: Synthetic antibody
agctccagcagcaccgcctacctgcagtggagcagcctgaaggcctcggacaccgccatgtattactgtgcgagacaagaaaatagtgggagcttccaaataacacactttgactactggggccaggga

SEQ ID NO: 5508 - protein, 43 aa, Artificial Sequence
  Description of Artificial Sequence: Synthetic antibody
SSSSTAYLQWSSLKASDTAMYYCARQENSGSFQITHFDYWGQG

SEQ ID NO: 5509 - DNA, 129 bp, Artificial Sequence
  Description of Artificial Sequence: Synthetic antibody
aagtccatcagcaccgcctacctgcagtggagcagcctgaaggcctcggacaccgccatgtattactgtgcgagacaagaaaatagtgggagcttccaaataacacactttgactactggggccaggga

SEQ ID NO: 5510 - protein, 43 aa, Artificial Sequence
  Description of Artificial Sequence: Synthetic antibody
KSISTAYLQWSSLKASDTAMYYCARQENSGSFQITHFDYWGQG

SEQ ID NO: 5511 - protein, 20 aa, Artificial Sequence
  Description of Artificial Sequence: Synthetic antibody
CAKGPYGDDRFFFYYGMDVW

SEQ ID NO: 5512 - DNA, 129 bp, Artificial Sequence
  Description of Artificial Sequence: Synthetic antibody
aagaacacactgtggctgcaaatggacagcctgagagccggggacacggccatatattactgtgcgaaaggtccctacggtgacgaccgattcttcttctactacggtatggacgtctggggccaaggg

SEQ ID NO: 5513 - protein, 43 aa, Artificial Sequence
  Description of Artificial Sequence: Synthetic antibody
KNTLWLQMDSLRAGDTAIYYCAKGPYGDDRFFFYYGMDVWGQG

SEQ ID NO: 5514 - DNA, 129 bp, Artificial Sequence
  Description of Artificial Sequence: Synthetic antibody
aagaacacactgtggctgcaaatgaacagcctgagagccgaggacacggccatatattactgtgcgaaaggtccctacggtgacgaccgattcttcttctactacggtatggacgtctggggccaaggg

SEQ ID NO: 5515 - protein, 43 aa, Artificial Sequence
  Description of Artificial Sequence: Synthetic antibody
KNTLWLQMNSLRAEDTAIYYCAKGPYGDDRFFFYYGMDVWGQG

SEQ ID NO: 5516 - protein, 24 aa, Artificial Sequence
  Description of Artificial Sequence: Synthetic antibody
CARGGGKYYYGSGRHYYYYGMDVW

SEQ ID NO: 5517 - DNA, 129 bp, Artificial Sequence
  Description of Artificial Sequence: Synthetic antibody
tccctgaagctgagctctgtgaccgccgcggactcggctgtgtattactgtgcgagaggaggggggaaatattactatggttcggggaggcactactactactacggtatggacgtctggggccaaggg

SEQ ID NO: 5518 - protein, 43 aa, Artificial Sequence
  Description of Artificial Sequence: Synthetic antibody
SLKLSSVTAADSAVYYCARGGGKYYYGSGRHYYYYGMDVWGQG

SEQ ID NO: 5519 - DNA, 129 bp, Artificial Sequence
  Description of Artificial Sequence: Synthetic antibody
tccctgaagctgagctctgtgaccgccgcggacacggctgtgtattactgtgcgagaggaggggggaaatattactatggttcggggaggcactactactactacggtatggacgtctggggccaaggg

SEQ ID NO: 5520 - protein, 43 aa, Artificial Sequence
  Description of Artificial Sequence: Synthetic antibody
SLKLSSVTAADTAVYYCARGGGKYYYGSGRHYYYYGMDVWGQG

SEQ ID NO: 5521 - protein, 22 aa, Artificial Sequence
  Description of Artificial Sequence: Synthetic antibody
CARDRDYDDTSNYYHGGYFDSW

SEQ ID NO: 5522 - DNA, 129 bp, Artificial Sequence
  Description of Artificial Sequence: Synthetic antibody
tccctatatctgcaaatgaacggtctgagagccgaggacacggccctctattactgtgcgagagatcgtgattatgatgatacgagtaattattaccacggcgggtactttgactcctggggccaggga

SEQ ID NO: 5523 - protein, 43 aa, Artificial Sequence
  Description of Artificial Sequence: Synthetic antibody
SLYLQMNGLRAEDTALYYCARDRDYDDTSNYYHGGYFDSWGQG

SEQ ID NO: 5524 - DNA, 129 bp, Artificial Sequence
  Description of Artificial Sequence: Synthetic antibody
tccatatatctgcaaatgaacggtctgagagccgaggacacggccctctattactgtgcgagagatcgtgattatgatgatacgagtaattattaccacggcgggtactttgactcctggggccaggga

SEQ ID NO: 5525 - protein, 43 aa, Artificial Sequence
  Description of Artificial Sequence: Synthetic antibody
SIYLQMNGLRAEDTALYYCARDRDYDDTSNYYHGGYFDSWGQG

SEQ ID NO: 5526 - protein, 18 aa, Artificial Sequence
  Description of Artificial Sequence: Synthetic antibody
CARDGTQLVLDLHAFDIW

SEQ ID NO: 5527 - DNA, 129 bp, Artificial Sequence
  Description of Artificial Sequence: Synthetic antibody
aaatccacgtgcacagcctacatggagctgagcagcctgagatctgaggacacggccgtgtattactgtgcgagagatggaacgcagctggtactggatctacatgcttttgatatctggggccaaggg

SEQ ID NO: 5528 - protein, 43 aa, Artificial Sequence
  Description of Artificial Sequence: Synthetic antibody
KSTCTAYMELSSLRSEDTAVYYCARDGTQLVLDLHAFDIWGQG

SEQ ID NO: 5529 - DNA, 129 bp, Artificial Sequence
  Description of Artificial Sequence: Synthetic antibody
aaatccacgagcacagcctacatggagctgagcagcctgagatctgaggacacggccgtgtattactgtgcgagagatggaacgcagctggtactggatctacatgcttttgatatctggggccaaggg

SEQ ID NO: 5530 - protein, 43 aa, Artificial Sequence
  Description of Artificial Sequence: Synthetic antibody
KSTSTAYMELSSLRSEDTAVYYCARDGTQLVLDLHAFDIWGQG

SEQ ID NO: 5531 - protein, 14 aa, Artificial Sequence
  Description of Artificial Sequence: Synthetic antibody
CASGGVRGVIMVYW

SEQ ID NO: 5532 - DNA, 129 bp, Artificial Sequence
  Description of Artificial Sequence: Synthetic antibody
ttatcagtagacacgtccaagaaccagttctccctgaagctgagctctgtgaccgccgcggacacggctgtgtattactgtgcgagcgggggggttcggggagttattatggtctactggggccaggga

SEQ ID NO: 5533 - protein, 43 aa, Artificial Sequence
  Description of Artificial Sequence: Synthetic antibody
LSVDTSKNQFSLKLSSVTAADTAVYYCASGGVRGVIMVYWGQG

SEQ ID NO: 5534 - DNA, 129 bp, Artificial Sequence
  Description of Artificial Sequence: Synthetic antibody
atatcagtagacacgtccaagaaccagttctccctgaagctgagctctgtgaccgccgcggacacggctgtgtattactgtgcgagcgggggggttcggggagttattatggtctactggggccaggga

SEQ ID NO: 5535 - protein, 43 aa, Artificial Sequence
  Description of Artificial Sequence: Synthetic antibody
ISVDTSKNQFSLKLSSVTAADTAVYYCASGGVRGVIMVYWGQG

SEQ ID NO: 5536 - protein, 25 aa, Artificial Sequence
  Description of Artificial Sequence: Synthetic antibody
CARGLRSPPHTASKTPKKYWYFDLW

SEQ ID NO: 5537 - DNA, 129 bp, Artificial Sequence
  Description of Artificial Sequence: Synthetic antibody
ttggagctgagcagcctgagatctgaggacacggccgtgtattactgtgcgagaggccttcgttcccccccccatacggcatcgaaaaccccgaagaaatactggtacttcgatctctggggccgtggc

SEQ ID NO: 5538 - protein, 43 aa, Artificial Sequence
  Description of Artificial Sequence: Synthetic antibody
LELSSLRSEDTAVYYCARGLRSPPHTASKTPKKYWYFDLWGRG

SEQ ID NO: 5539 - DNA, 129 bp, Artificial Sequence
  Description of Artificial Sequence: Synthetic antibody
atggagctgagcagcctgagatctgaggacacggccgtgtattactgtgcgagaggccttcgttcccccccccatacggcatcgaaaaccccgaagaaatactggtacttcgatctctggggccgtggc

SEQ ID NO: 5540 - protein, 43 aa, Artificial Sequence
  Description of Artificial Sequence: Synthetic antibody
MELSSLRSEDTAVYYCARGLRSPPHTASKTPKKYWYFDLWGRG

SEQ ID NO: 5541 - protein, 14 aa, Artificial Sequence
  Description of Artificial Sequence: Synthetic antibody
CARGTTVVTGFDYW

SEQ ID NO: 5542 - DNA, 129 bp, Artificial Sequence
  Description of Artificial Sequence: Synthetic antibody
catcaacccagacacatccaagaaccagttctcctgcagctgaactctgtgactcccgaggacacggctgtgtattactgtgcaagggggactacggtggtaacggggttcgactactggggccaggga

SEQ ID NO: 5543 - protein, 43 aa, Artificial Sequence
  Description of Artificial Sequence: Synthetic antibody
HQPRHIQEPVLLQLNSVTPEDTAVYYCARGTTVVTGFDYWGQG

SEQ ID NO: 5544 - DNA, 129 bp, Artificial Sequence
  Description of Artificial Sequence: Synthetic antibody
atcaacccagacacatccaagaaccagttctccctgcagctgaactctgtgactcccgaggacacggctgtgtattactgtgcaagggggactacggtggtaacggggttcgactactggggccaggga

SEQ ID NO: 5545 - protein, 43 aa, Artificial Sequence
  Description of Artificial Sequence: Synthetic antibody
INPDTSKNQFSLQLNSVTPEDTAVYYCARGTTVVTGFDYWGQG

SEQ ID NO: 5546 - protein, 8 aa, Artificial Sequence [sequence omitted]

SEQ ID NO: 5547 - DNA, 129 bp, Artificial Sequence
  Description of Artificial Sequence: Synthetic antibody
gtgaagggcctattcaccatctccagagacaattccaagaacacgctgtatcttcaaatgaacagcctgagagccgaggacacggccgtgtattactgtgcgagagagccccgatactggggccaggga

SEQ ID NO: 5548 - protein, 43 aa, Artificial Sequence
  Description of Artificial Sequence: Synthetic antibody
VKGLFTISRDNSKNTLYLQMNSLRAEDTAVYYCAREPRYWGQG

SEQ ID NO: 5549 - DNA, 129 bp, Artificial Sequence
  Description of Artificial Sequence: Synthetic antibody
gtgaagggccgattcaccatctccagagacaattccaagaacacgctgtatcttcaaatgaacagcctgagagccgaggacacggccgtgtattactgtgcgagagagccccgatactggggccaggga

SEQ ID NO: 5550 - protein, 43 aa, Artificial Sequence
  Description of Artificial Sequence: Synthetic antibody
VKGRFTISRDNSKNTLYLQMNSLRAEDTAVYYCAREPRYWGQG

SEQ ID NO: 5551 - protein, 13 aa, Artificial Sequence
  Description of Artificial Sequence: Synthetic antibody
CASSPWDSRTSLW

SEQ ID NO: 5552 - DNA, 129 bp, Artificial Sequence
  Description of Artificial Sequence: Synthetic antibody
accatgaccagggacacgtccatcagcacggcctacatggagctgagcaggctgagatctgacgacacggccgtgtattactgtgcgagttccccctgggatagtaggacctccctctggggccaggga

SEQ ID NO: 5553 - protein, 43 aa, Artificial Sequence
  Description of Artificial Sequence: Synthetic antibody
TMTRDTSISTAYMELSRLRSDDTAVYYCASSPWDSRTSLWGQG

SEQ ID NO: 5554 - DNA, 129 bp, Artificial Sequence
  Description of Artificial Sequence: Synthetic antibody
accatgaccagggacacgtccatcagcacagcctacatggagctgagcaggctgagatctgacgacacggccgtgtattactgtgcgagttccccctgggatagtaggacctccctctggggccaggga

SEQ ID NO: 5555 - protein, 21 aa, Artificial Sequence
  Description of Artificial Sequence: Synthetic antibody
CARGLKVDTAMVRVALGMDVW

SEQ ID NO: 5556 - DNA, 129 bp, Artificial Sequence
  Description of Artificial Sequence: Synthetic antibody
aaccagttctccctggagctgagctctgtgaccgccgcggacacggctgtggattactgtgcgagaggccttaaggtggatacagctatggttagagtagcactcggtatggacgtctggggccaaggg

SEQ ID NO: 5557 - protein, 43 aa, Artificial Sequence
  Description of Artificial Sequence: Synthetic antibody
NQFSLELSSVTAADTAVDYCARGLKVDTAMVRVALGMDVWGQG

SEQ ID NO: 5558 - DNA, 129 bp, Artificial Sequence
  Description of Artificial Sequence: Synthetic antibody
aaccagttctccctgaagctgagctctgtgaccgccgcggacacggctgtgtattactgtgcgagaggccttaaggtggatacagctatggttagagtagcactcggtatggacgtctggggccaaggg

SEQ ID NO: 5559 - protein, 43 aa, Artificial Sequence
  Description of Artificial Sequence: Synthetic antibody
NQFSLKLSSVTAADTAVYYCARGLKVDTAMVRVALGMDVWGQG

SEQ ID NO: 5560 - protein, 21 aa, Artificial Sequence
  Description of Artificial Sequence: Synthetic antibody
CAKSLGRSWYNPRHYYGMDVW

SEQ ID NO: 5561 - DNA, 129 bp, Artificial Sequence
  Description of Artificial Sequence: Synthetic antibody
tacacgatgtatctgcaaatgaacagcctgagagccgaggacacggccgtatattactgtgcgaaatccctgggccgcagctggtacaatccgcggcactactacggtatggacgtctggggccaaggg

SEQ ID NO: 5562 - protein, 43 aa, Artificial Sequence
  Description of Artificial Sequence: Synthetic antibody
YTMYLQMNSLRAEDTAVYYCAKSLGRSWYNPRHYYGMDVWGQG

SEQ ID NO: 5563 - DNA, 129 bp, Artificial Sequence
  Description of Artificial Sequence: Synthetic antibody
aacacgctgtatctgcaaatgaacagcctgagagccgaggacacggccgtatattactgtgcgaaatccctgggccgcagctggtacaatccgcggcactactacggtatggacgtctggggccaaggg

SEQ ID NO: 5564 - protein, 43 aa, Artificial Sequence
  Description of Artificial Sequence: Synthetic antibody
NTLYLQMNSLRAEDTAVYYCAKSLGRSWYNPRHYYGMDVWGQG

SEQ ID NO: 5565 - protein, 20 aa, Artificial Sequence
  Description of Artificial Sequence: Synthetic antibody
CARRNYYASGSPSYWYFDLW

SEQ ID NO: 5566 - DNA, 129 bp, Artificial Sequence
  Description of Artificial Sequence: Synthetic antibody
aagaacacgctgtctcttcaaatgaacagcctgagagccgaggacgcggccatttattattgtgcgagacggaattactatgcctcggggagcccctcgtattggtacttcgatctctggggccgtggc

SEQ ID NO: 5567 - protein, 43 aa, Artificial Sequence
  Description of Artificial Sequence: Synthetic antibody
KNTLSLQMNSLRAEDAAIYYCARRNYYASGSPSYWYFDLWGRG

SEQ ID NO: 5568 - DNA, 129 bp, Artificial Sequence
  Description of Artificial Sequence: Synthetic antibody
aagaacacgctgtctcttcaaatgaacagcctgagagccgaggacacggccatttattattgtgcgagacggaattactatgcctcggggagcccctcgtattggtacttcgatctctggggccgtggc

SEQ ID NO: 5569 - protein, 43 aa, Artificial Sequence
  Description of Artificial Sequence: Synthetic antibody
KNTLSLQMNSLRAEDTAIYYCARRNYYASGSPSYWYFDLWGRG

SEQ ID NO: 5570 - protein, 24 aa, Artificial Sequence
  Description of Artificial Sequence: Synthetic antibody
CAKDFRRIVVVVASTLHYYGMDVW

SEQ ID NO: 5571 - DNA, 129 bp, Artificial Sequence
  Description of Artificial Sequence: Synthetic antibody
tatctgcaaatgaacagtctgagagtcgaggacacggccgtgtattactgtgcaaaagattttcgccgtattgtagtggtggtagcttctactctacactactacggtatggacgtctggggccaaggg

SEQ ID NO: 5572 - protein, 43 aa, Artificial Sequence
  Description of Artificial Sequence: Synthetic antibody
YLQMNSLRVEDTAVYYCAKDFRRIVVVVASTLHYYGMDVWGQG

SEQ ID NO: 5573 - DNA, 129 bp, Artificial Sequence
  Description of Artificial Sequence: Synthetic antibody
tatatgaaaatgaacagtctgagagtcgaggacacggccgtgtattactgtgcaaaagattttcgccgtattgtagtggtggtagcttctactctacactactacggtatggacgtctggggccaaggg

SEQ ID NO: 5574 - protein, 43 aa, Artificial Sequence
  Description of Artificial Sequence: Synthetic antibody
YMKMNSLRVEDTAVYYCAKDFRRIVVVVASTLHYYGMDVWGQG

SEQ ID NO: 5575 - protein, 17 aa, Artificial Sequence
  Description of Artificial Sequence: Synthetic antibody
CVRGHYDRSGSWGFDYW

SEQ ID NO: 5576 - DNA, 129 bp, Artificial Sequence
  Description of Artificial Sequence: Synthetic antibody
gacaatgccaataactctttgtatctgcaaatgaacaatctgagagacgaggacacggctctatattattgtgtgcgagggcactatgataggagtggttcttggggctttgactactggggccaggga

SEQ ID NO: 5577 - protein, 43 aa, Artificial Sequence
  Description of Artificial Sequence: Synthetic antibody
DNANNSLYLQMNNLRDEDTALYYCVRGHYDRSGSWGFDYWGQG

SEQ ID NO: 5578 - DNA, 129 bp, Artificial Sequence
  Description of Artificial Sequence: Synthetic antibody
gacaatgccaagaactcattgtatctgcaaatgaacaatctgagagacgaggacacggctctatattattgtgtgcgagggcactatgataggagtggttcttggggctttgactactggggccaggga

SEQ ID NO: 5579 - protein, 43 aa, Artificial Sequence
  Description of Artificial Sequence: Synthetic antibody
DNAKNSLYLQMNNLRDEDTALYYCVRGHYDRSGSWGFDYWGQG

SEQ ID NO: 5580 - protein, 20 aa, Artificial Sequence
  Description of Artificial Sequence: Synthetic antibody
CARSSGDFWSGYPSLGFDPW

SEQ ID NO: 5581 - DNA, 129 bp, Artificial Sequence
  Description of Artificial Sequence: Synthetic antibody
gtcagcacggcatatctgcagatcagcagcctaaaggctgaggacactgccgtgtattactgtgcgagatcctccggggatttttggagtggttatccctcgctggggttcgacccctggggccaggga

SEQ ID NO: 5582 - protein, 43 aa, Artificial Sequence
  Description of Artificial Sequence: Synthetic antibody
VSTAYLQISSLKAEDTAVYYCARSSGDFWSGYPSLGFDPWGQG

SEQ ID NO: 5583 - DNA, 129 bp, Artificial Sequence
  Description of Artificial Sequence: Synthetic antibody
gtcagcacggcatatccgcagatcagcagcctgaaggctgaggacactgccgtgtattactgtgcgagatcctccggggatttttggagtggttatccctcgctggggttcgacccctggggccaggga

SEQ ID NO: 5584 - protein, 43 aa, Artificial Sequence
  Description of Artificial Sequence: Synthetic antibody
VSTAYPQISSLKAEDTAVYYCARSSGDFWSGYPSLGFDPWGQG

SEQ ID NO: 5585 - protein, 14 aa, Artificial Sequence
  Description of Artificial Sequence: Synthetic antibody
CARMAAAAGQFDYW

SEQ ID NO: 5586 - DNA, 129 bp, Artificial Sequence
  Description of Artificial Sequence: Synthetic antibody
atctccatagaaaatgccaagaactccttgtatcttcaaatgaacagcctgagagccggtgacacggctgtgtattactgtgcaagaatggcggcagcagctggccaatttgactactggggccaggga

SEQ ID NO: 5587 - protein, 43 aa, Artificial Sequence
  Description of Artificial Sequence: Synthetic antibody
ISIENAKNSLYLQMNSLRAGDTAVYYCARMAAAAGQFDYWGQG

SEQ ID NO: 5588 - DNA, 129 bp, Artificial Sequence
  Description of Artificial Sequence: Synthetic antibody
atctccagagaaaatgccaagaactccttgtatcttcaaatgaacagcctgagagccggggacacggctgtgtattactgtgcaagaatggcggcagcagctggccaatttgactactggggccaggga

SEQ ID NO: 5589 - protein, 43 aa, Artificial Sequence
  Description of Artificial Sequence: Synthetic antibody
ISRENAKNSLYLQMNSLRAGDTAVYYCARMAAAAGQFDYWGQG

SEQ ID NO: 5590 - protein, 16 aa, Artificial Sequence
  Description of Artificial Sequence: Synthetic antibody
CARKYYYDSSGSYDYW

SEQ ID NO: 5591 - DNA, 129 bp, Artificial Sequence
  Description of Artificial Sequence: Synthetic antibody
tgggacacgtccacgagcacagtctacatggagctgagcagcctgagatctgaggacacggccgtgtattactgtgcgaggaagtattactatgatagtagtggttcctatgactactggggccaggga

SEQ ID NO: 5592 - protein, 43 aa, Artificial Sequence
  Description of Artificial Sequence: Synthetic antibody
WDTSTSTVYMELSSLRSEDTAVYYCARKYYYDSSGSYDYWGQG

SEQ ID NO: 5593 - DNA, 129 bp, Artificial Sequence
  Description of Artificial Sequence: Synthetic antibody
agggacacgtccacgagcacagtctacatggagctgagcagcctgagatctgaggacacggccgtgtattactgtgcgaggaagtattactatgatagtagtggttcctatgactactggggccaggga

SEQ ID NO: 5594 - protein, 43 aa, Artificial Sequence
  Description of Artificial Sequence: Synthetic antibody
RDTSTSTVYMELSSLRSEDTAVYYCARKYYYDSSGSYDYWGQG

SEQ ID NO: 5595 - protein, 16 aa, Artificial Sequence
  Description of Artificial Sequence: Synthetic antibody
CAHHYSSGWYIIFDYW

SEQ ID NO: 5596 - DNA, 129 bp, Artificial Sequence
  Description of Artificial Sequence: Synthetic antibody
caaggacacctccaaaaccaggtggtccttacaatgaccaacatggaccctgtggacacagccacatattactgtgcacaccattatagcagtggctggtacataatctttgactactggggccaggga

SEQ ID NO: 5597 - protein, 43 aa, Artificial Sequence
  Description of Artificial Sequence: Synthetic antibody
QGHLQNQVVLTMTNMDPVDTATYYCAHHYSSGWYIIFDYWGQG

SEQ ID NO: 5598 - DNA, 129 bp, Artificial Sequence
  Description of Artificial Sequence: Synthetic antibody
aaggacacctccaaaaaccaggtggtccttacaatgaccaacatggaccctgtggacacagccacatattactgtgcacaccattatagcagtggctggtacataatctttgactactggggccaggga

SEQ ID NO: 5599 - protein, 43 aa, Artificial Sequence
  Description of Artificial Sequence: Synthetic antibody
KDTSKNQVVLTMTNMDPVDTATYYCAHHYSSGWYIIFDYWGQG

SEQ ID NO: 5600 - protein, 16 aa, Artificial Sequence
  Description of Artificial Sequence: Synthetic antibody
CARVSSSWGYWYFDLW

SEQ ID NO: 5601 - DNA, 129 bp, Artificial Sequence
  Description of Artificial Sequence: Synthetic antibody
ccagacacatccaagaaccagttctccctgcagctgaactctgtgactcccgaggacacggctgtgtattgctgtgcaagagttagcagcagctggggctactggtacttcgatctctggggccgtggc

SEQ ID NO: 5602 - protein, 43 aa, Artificial Sequence
  Description of Artificial Sequence: Synthetic antibody
PDTSKNQFSLQLNSVTPEDTAVYCCARVSSSWGYWYFDLWGRG

SEQ ID NO: 5603 - DNA, 129 bp, Artificial Sequence
  Description of Artificial Sequence: Synthetic antibody
ccagacacatccaagaaccagttctccctgcagctgaactctgtgactcccgaggacacggctgtgtattactgtgcaagagttagcagcagctggggctactggtacttcgatctctggggccgtggc

SEQ ID NO: 5604 - protein, 43 aa, Artificial Sequence
  Description of Artificial Sequence: Synthetic antibody
PDTSKNQFSLQLNSVTPEDTAVYYCARVSSSWGYWYFDLWGRG

SEQ ID NO: 5605 - protein, 11 aa, Artificial Sequence
  Description of Artificial Sequence: Synthetic antibody
CSRGTRELPDW

SEQ ID NO: 5606 - DNA, 129 bp, Artificial Sequence
  Description of Artificial Sequence: Synthetic antibody
cgattcaccatctccagagacaacgccaagaactccctgtatctgcaaatgaatagtctgagacctgaggacacggccttatattactgttcaagagggaccagggagctgccggactggggccaggga

SEQ ID NO: 5607 - protein, 43 aa, Artificial Sequence
  Description of Artificial Sequence: Synthetic antibody
RFTISRDNAKNSLYLQMNSLRPEDTALYYCSRGTRELPDWGQG

SEQ ID NO: 5608 - DNA, 129 bp, Artificial Sequence
  Description of Artificial Sequence: Synthetic antibody
cgattcaccatctccagagacaacgccaagaactccctgtatctgcaaatgaatagcctgagacctgaggacacggccttatattactgttcaagagggaccagggagctgccggactggggccaggga

SEQ ID NO: 5609 - protein, 21 aa, Artificial Sequence
  Description of Artificial Sequence: Synthetic antibody
CAKDTSIEYSSASGGGSFDYW

SEQ ID NO: 5610 - DNA, 129 bp, Artificial Sequence
  Description of Artificial Sequence: Synthetic antibody
aactccctgtatctgcaaatgaacagtctgagagctgaggacacggccttgtattactgtgcaaaagatacgagcatcgagtatagcagcgcgtccggggggggtagttttgactactggggccaggga

SEQ ID NO: 5611 - protein, 43 aa, Artificial Sequence
  Description of Artificial Sequence: Synthetic antibody
NSLYLQMNSLRAEDTALYYCAKDTSIEYSSASGGGSFDYWGQG

SEQ ID NO: 5612 - protein, 19 aa, Artificial Sequence
  Description of Artificial Sequence: Synthetic antibody
CARDWGYSYGYRGWYLDLW

SEQ ID NO: 5613 - DNA, 129 bp, Artificial Sequence
  Description of Artificial Sequence: Synthetic antibody
tctgtcggcacgacatatctgcagatcagcagcctaaaggctggggacactgccgtgtattactgtgcgagagattggggatacagctatggttacaggggctggtacctcgatctctggggccgtggc

SEQ ID NO: 5614 - protein, 43 aa, Artificial Sequence
  Description of Artificial Sequence: Synthetic antibody
SVGTTYLQISSLKAGDTAVYYCARDWGYSYGYRGWYLDLWGRG

SEQ ID NO: 5615 - DNA, 129 bp, Artificial Sequence
  Description of Artificial Sequence: Synthetic antibody
tctgtcggcacgacatatctgcagatcagcagcctaaaggctgaggacactgccgtgtattactgtgcgagagattggggatacagctatggttacaggggctggtacctcgatctctggggccgtggc

SEQ ID NO: 5616 - protein, 43 aa, Artificial Sequence
  Description of Artificial Sequence: Synthetic antibody
SVGTTYLQISSLKAEDTAVYYCARDWGYSYGYRGWYLDLWGRG

SEQ ID NO: 5617 - protein, 23 aa, Artificial Sequence
  Description of Artificial Sequence: Synthetic antibody
CARVSWVRMGATRGYYYYGMDVW

SEQ ID NO: 5618 - DNA, 129 bp, Artificial Sequence
  Description of Artificial Sequence: Synthetic antibody
ctgtatctacaaatgaacagcctgaaaaccgaggacacggccgtgtattactgtgctagagtctcgtgggtcagaatgggagctactcggggatactattactacggtatggacgtctggggccaaggg

SEQ ID NO: 5619 - protein, 43 aa, Artificial Sequence
  Description of Artificial Sequence: Synthetic antibody
LYLQMNSLKTEDTAVYYCARVSWVRMGATRGYYYYGMDVWGQG

SEQ ID NO: 5620 - DNA, 129 bp, Artificial Sequence
  Description of Artificial Sequence: Synthetic antibody
ctgtatatacaattgaacagcctgaaaaccgaggacacggccgtgtattactgtgctagagtctcgtgggtcagaatgggagctactcggggatactattactacggtatggacgtctggggccaaggg

SEQ ID NO: 5621 - protein, 43 aa, Artificial Sequence
  Description of Artificial Sequence: Synthetic antibody
LYIQLNSLKTEDTAVYYCARVSWVRMGATRGYYYYGMDVWGQG

SEQ ID NO: 5622 - protein, 22 aa, Artificial Sequence
  Description of Artificial Sequence: Synthetic antibody
CTRHGYDILTGYYETHDAFDIW

SEQ ID NO: 5623 - DNA, 129 bp, Artificial Sequence
  Description of Artificial Sequence: Synthetic antibody
acggcgtatctgcaaatgaacagcctgaaaaccgaggacacggccgtgtattactgtactagacatggttacgatattttgactggttattatgaaacccatgatgcttttgatatctggggccaaggg

SEQ ID NO: 5624 - protein, 43 aa, Artificial Sequence
  Description of Artificial Sequence: Synthetic antibody
TAYLQMNSLKTEDTAVYYCTRHGYDILTGYYETHDAFDIWGQG

SEQ ID NO: 5625 - DNA, 129 bp, Artificial Sequence
  Description of Artificial Sequence: Synthetic antibody
acggcgtatctgaaaatgaacagcctgaaaaccgaggacacggccgtgtattactgtactagacatggttacgatattttgactggttattatgaaacccatgatgcttttgatatctggggccaaggg

SEQ ID NO: 5626 - protein, 43 aa, Artificial Sequence
  Description of Artificial Sequence: Synthetic antibody
TAYLKMNSLKTEDTAVYYCTRHGYDILTGYYETHDAFDIWGQG

SEQ ID NO: 5627 - protein, 9 aa, Artificial Sequence
  Description of Artificial Sequence: Synthetic antibody
CAKTRFDYW

SEQ ID NO: 5628 - DNA, 129 bp, Artificial Sequence
  Description of Artificial Sequence: Synthetic antibody
ttgggccggttcaccatctccagagacaattccaagaacacgctgtatctgcaaatgaacagcctgagagccgaggacacggccgtatattactgtgcgaaaacccgatttgactactggggccaggga

SEQ ID NO: 5629 - protein, 43 aa, Artificial Sequence
  Description of Artificial Sequence: Synthetic antibody
LGRFTISRDNSKNTLYLQMNSLRAEDTAVYYCAKTRFDYWGQG

SEQ ID NO: 5630 - DNA, 129 bp, Artificial Sequence
  Description of Artificial Sequence: Synthetic antibody
aagggccggttcaccatctccagagacaattccaagaacacgctgtatctgcaaatgaacagcctgagagccgaggacacggccgtatattactgtgcgaaaacccgatttgactactggggccaggga

SEQ ID NO: 5631 - protein, 43 aa, Artificial Sequence
  Description of Artificial Sequence: Synthetic antibody
KGRFTISRDNSKNTLYLQMNSLRAEDTAVYYCAKTRFDYWGQG

SEQ ID NO: 5632 - protein, 13 aa, Artificial Sequence
  Description of Artificial Sequence: Synthetic antibody
CAKGGDYYGMDVW

SEQ ID NO: 5633 - DNA, 129 bp, Artificial Sequence
  Description of Artificial Sequence: Synthetic antibody
accatctccatatataattccaagaacacgctgtatctgcaaatgaacagcctgagagccgaggacacggccgtatattactgtgcgaaaggcggtgactactacggtatggacgtctggggccaaggg

SEQ ID NO: 5634 - protein, 43 aa, Artificial Sequence
  Description of Artificial Sequence: Synthetic antibody
TISIYNSKNTLYLQMNSLRAEDTAVYYCAKGGDYYGMDVWGQG

SEQ ID NO: 5635 - DNA, 129 bp, Artificial Sequence
  Description of Artificial Sequence: Synthetic antibody
accatctccagagataattccaagaacacgctgtatctgcaaatgaacagcctgagagccgaggacacggccgtatattactgtgcgaaaggcggtgactactacggtatggacgtctggggccaaggg

SEQ ID NO: 5636 - protein, 43 aa, Artificial Sequence
  Description of Artificial Sequence: Synthetic antibody
TISRDNSKNTLYLQMNSLRAEDTAVYYCAKGGDYYGMDVWGQG

SEQ ID NO: 5637 - protein, 17 aa, Artificial Sequence
  Description of Artificial Sequence: Synthetic antibody
CARIQGYSYGSYGMDVW

SEQ ID NO: 5638 - DNA, 129 bp, Artificial Sequence
  Description of Artificial Sequence: Synthetic antibody
gacacctccaaaaaccaggtggtccttacaatgaccaacatggaccctgtggacacagccacgtattactgtgcacggatacaaggatacagctatggttcgtacggtatggacgtctggggccaaggg

SEQ ID NO: 5639 - protein, 43 aa, Artificial Sequence
  Description of Artificial Sequence: Synthetic antibody
DTSKNQVVLTMTNMDPVDTATYYCARIQGYSYGSYGMDVWGQG

SEQ ID NO: 5640 - DNA, 129 bp, Artificial Sequence
  Description of Artificial Sequence: Synthetic antibody
ggacacctccaaaaccaggtggtccttacaatgaccaacatggaccctgtggacacagccacgtattactgtgcacggatacaaggatacagctatggttcgtacggtatggacgtctggggccaaggg

SEQ ID NO: 5641 - protein, 43 aa, Artificial Sequence
  Description of Artificial Sequence: Synthetic antibody
GHLQNQVVLTMTNMDPVDTATYYCARIQGYSYGSYGMDVWGQG

SEQ ID NO: 5642 - protein, 25 aa, Artificial Sequence
  Description of Artificial Sequence: Synthetic antibody
CARGGAYYDILTGYYRPYYYGMDVW

SEQ ID NO: 5643 - DNA, 129 bp, Artificial Sequence
  Description of Artificial Sequence: Synthetic antibody
ttggagctgagcagcctgagatctgaggacacggccgtgtattactgtgcgagagggggggcgtattacgatattttgactggttattataggccctactactacggtatggacgtctggggccaaggg

SEQ ID NO: 5644 - protein, 43 aa, Artificial Sequence
  Description of Artificial Sequence: Synthetic antibody
LELSSLRSEDTAVYYCARGGAYYDILTGYYRPYYYGMDVWGQG

SEQ ID NO: 5645 - DNA, 129 bp, Artificial Sequence
  Description of Artificial Sequence: Synthetic antibody
atggagctgagcagcctgagatctgaggacacggccgtgtattactgtgcgagagggggggcgtattacgatattttgactggttattataggccctactactacggtatggacgtctggggccaaggg

SEQ ID NO: 5646 - protein, 43 aa, Artificial Sequence
  Description of Artificial Sequence: Synthetic antibody
MELSSLRSEDTAVYYCARGGAYYDILTGYYRPYYYGMDVWGQG

SEQ ID NO: 5647 - protein, 13 aa, Artificial Sequence
  Description of Artificial Sequence: Synthetic antibody
CAREGGLGRLDPW

SEQ ID NO: 5648 - DNA, 129 bp, Artificial Sequence
  Description of Artificial Sequence: Synthetic antibody
accatcaacccagacacatccaagaaccagttctccctgcagctgaactctgtgactcccgaggacacggctgtatatttctgtgcaagagagggggggctgggccggctcgacccctggggccaggga

SEQ ID NO: 5649 - protein, 43 aa, Artificial Sequence
  Description of Artificial Sequence: Synthetic antibody
TINPDTSKNQFSLQLNSVTPEDTAVYFCAREGGLGRLDPWGQG

SEQ ID NO: 5650 - DNA, 129 bp, Artificial Sequence
  Description of Artificial Sequence: Synthetic antibody
accatcaacccacacacatccaagaaccagttctccctgcagctgaactctgtgactcccgaggacacggctgtatatttctgtgcaagagagggggggctgggccggctcgacccctggggccaggga

SEQ ID NO: 5651 - protein, 43 aa, Artificial Sequence
  Description of Artificial Sequence: Synthetic antibody
TINPHTSKNQFSLQLNSVTPEDTAVYFCAREGGLGRLDPWGQG

SEQ ID NO: 5652 - protein, 16 aa, Artificial Sequence
  Description of Artificial Sequence: Synthetic antibody
CAKDLHRASYYGMDIW

SEQ ID NO: 5653 - DNA, 129 bp, Artificial Sequence
  Description of Artificial Sequence: Synthetic antibody
caccacaacgccaggacttccgtgtacctgcagatgaacagtctgagaactgacgacacggccttgtatttctgtgcaaaagacctccacagggcctcttattatggtatggatatttggggccaaggg

SEQ ID NO: 5654 - protein, 43 aa, Artificial Sequence
  Description of Artificial Sequence: Synthetic antibody
HHNARTSVYLQMNSLRTDDTALYFCAKDLHRASYYGMDIWGQG

SEQ ID NO: 5655 - DNA, 129 bp, Artificial Sequence
  Description of Artificial Sequence: Synthetic antibody
agagacaacgccaggacttccgtgtacctgcagatgaacagtctgagaactgacgacacggccttgtatttctgtgcaaaagacctccacagggcctcttattatggtatggatatttggggccaaggg

SEQ ID NO: 5656 - protein, 43 aa, Artificial Sequence
  Description of Artificial Sequence: Synthetic antibody
RDNARTSVYLQMNSLRTDDTALYFCAKDLHRASYYGMDIWGQG

SEQ ID NO: 5657 - protein, 13 aa, Artificial Sequence
  Description of Artificial Sequence: Synthetic antibody
CARDSRGYGFDYW

SEQ ID NO: 5658 - DNA, 129 bp, Artificial Sequence
  Description of Artificial Sequence: Synthetic antibody
accatctccatacacaattccaagaacacgctgtatcttcaaatgaacagcctgagagccgaggacacggccgtgtattactgtgcgagagattcgcgtggttatggttttgactactggggccaggga

SEQ ID NO: 5659 - protein, 43 aa, Artificial Sequence
  Description of Artificial Sequence: Synthetic antibody
TISIHNSKNTLYLQMNSLRAEDTAVYYCARDSRGYGFDYWGQG

SEQ ID NO: 5660 - DNA, 129 bp, Artificial Sequence
  Description of Artificial Sequence: Synthetic antibody
accatctccagagacaattccaagaacacgctgtatcttcaaatgaacagcctgagagccgaggacacggccgtgtattactgtgcgagagattcgcgtggttatggttttgactactggggccaggga

SEQ ID NO: 5661 - protein, 43 aa, Artificial Sequence
  Description of Artificial Sequence: Synthetic antibody
TISRDNSKNTLYLQMNSLRAEDTAVYYCARDSRGYGFDYWGQG

SEQ ID NO: 5662 - protein, 14 aa, Artificial Sequence
  Description of Artificial Sequence: Synthetic antibody
CARAWGSIAAADYW

SEQ ID NO: 5663 - DNA, 129 bp, Artificial Sequence
  Description of Artificial Sequence: Synthetic antibody
tttaccgcggacaaatccacgagcacagcctacatggagctgagcagcctgatatctgaggacacggccgtgtattactgtgcgagagcttggggaagtatagcagccgctgactactggggccaggga

SEQ ID NO: 5664 - protein, 43 aa, Artificial Sequence
  Description of Artificial Sequence: Synthetic antibody
FTADKSTSTAYMELSSLISEDTAVYYCARAWGSIAAADYWGQG

SEQ ID NO: 5665 - DNA, 129 bp, Artificial Sequence
  Description of Artificial Sequence: Synthetic antibody
attaccgcggacaaatccacgagcacagcctacatggagctgagcagcctgagatctgaggacacggccgtgtattactgtgcgagagcttggggaagtatagcagccgctgactactggggccaggga

SEQ ID NO: 5666 - protein, 43 aa, Artificial Sequence
  Description of Artificial Sequence: Synthetic antibody
ITADKSTSTAYMELSSLRSEDTAVYYCARAWGSIAAADYWGQG

SEQ ID NO: 5667 - protein, 18 aa, Artificial Sequence
  Description of Artificial Sequence: Synthetic antibody
CARSRMVRGVIMTHFDIW

SEQ ID NO: 5668 - DNA, 129 bp, Artificial Sequence
  Description of Artificial Sequence: Synthetic antibody
acctccaaaaaccaggtggtccttacaatgaccaacatggaccctgtggacacagccacgtattactgtgcacggagccgtatggttcggggagttattatgacccattttgatatctggggccaaggg

SEQ ID NO: 5669 - protein, 43 aa, Artificial Sequence
  Description of Artificial Sequence: Synthetic antibody
TSKNQVVLTMTNMDPVDTATYYCARSRMVRGVIMTHFDIWGQG

SEQ ID NO: 5670 - DNA, 129 bp, Artificial Sequence
  Description of Artificial Sequence: Synthetic antibody
cacctccaataccaggtggtccttacaatgaccaacatggaccctgtggacacagccacgtattactgtgcacggagccgtatggttcggggagttattatgacccattttgatatctggggccaaggg

SEQ ID NO: 5671 - protein, 43 aa, Artificial Sequence
  Description of Artificial Sequence: Synthetic antibody
HLQYQVVLTMTNMDPVDTATYYCARSRMVRGVIMTHFDIWGQG

SEQ ID NO: 5672 - protein, 13 aa, Artificial Sequence
  Description of Artificial Sequence: Synthetic antibody
CARREVGAGLDYW

SEQ ID NO: 5673 - DNA, 129 bp, Artificial Sequence
  Description of Artificial Sequence: Synthetic antibody
accatctcagccgacaagtccatcagcaccgcctacctgcagtggagcagcctgaaggcctcggacaccgccatgtattgctgtgcgagacgggaagtgggagctggattagactactggggccaggga

SEQ ID NO: 5674 - protein, 43 aa, Artificial Sequence
  Description of Artificial Sequence: Synthetic antibody
TISADKSISTAYLQWSSLKASDTAMYCCARREVGAGLDYWGQG

SEQ ID NO: 5675 - DNA, 129 bp, Artificial Sequence
  Description of Artificial Sequence: Synthetic antibody
accatctcagccgacaagtccatcagcaccgcctacctgcagtggagcagcctgaaggcctcggacaccgccatgtattactgtgcgagacgggaagtgggagctggattagactactggggccaggga

SEQ ID NO: 5676 - protein, 43 aa, Artificial Sequence
  Description of Artificial Sequence: Synthetic antibody
TISADKSISTAYLQWSSLKASDTAMYYCARREVGAGLDYWGQG

SEQ ID NO: 5677 - protein, 13 aa, Artificial Sequence
  Description of Artificial Sequence: Synthetic antibody
CARSGATHYFDYW

SEQ ID NO: 5678 - DNA, 129 bp, Artificial Sequence
  Description of Artificial Sequence: Synthetic antibody
accatgaccacagacacatccacgagcacagcctacatggagctgaggagcctgagatctgacgacacggccgtgtattactgtgcgagatcgggagctacccactactttgactactggggccaggga

SEQ ID NO: 5679 - protein, 43 aa, Artificial Sequence
  Description of Artificial Sequence: Synthetic antibody
TMTTDTSTSTAYMELRSLRSDDTAVYYCARSGATHYFDYWGQG

SEQ ID NO: 5680 - DNA, 129 bp, Artificial Sequence
  Description of Artificial Sequence: Synthetic antibody
accatgaccacagacacatccacgagcacagcctacatggagctgaggagcctgagacctgacgacacggccgtgtattactgtgcgagatcgggagctacccactactttgactactggggccaggga

SEQ ID NO: 5681 - protein, 43 aa, Artificial Sequence
  Description of Artificial Sequence: Synthetic antibody
TMTTDTSTSTAYMELRSLRPDDTAVYYCARSGATHYFDYWGQG

SEQ ID NO: 5682 - protein, 17 aa, Artificial Sequence
  Description of Artificial Sequence: Synthetic antibody
CAKDCCSGILYYGMDVW

SEQ ID NO: 5683 - DNA, 129 bp, Artificial Sequence
  Description of Artificial Sequence: Synthetic antibody
gacagcgccaagaactccctgtatctgcaaatgaacagtctgagagctgaggacacggccttgtattactgtgcaaaagattgctgctccggcatcctctactacggtatggacgtctggggccaaggg

SEQ ID NO: 5684 - protein, 43 aa, Artificial Sequence
  Description of Artificial Sequence: Synthetic antibody
DSAKNSLYLQMNSLRAEDTALYYCAKDCCSGILYYGMDVWGQG

SEQ ID NO: 5685 - DNA, 129 bp, Artificial Sequence
  Description of Artificial Sequence: Synthetic antibody
gacaacgccaagaactccctgtatctgcaaatgaacagtctgagagctgaggacacggccttgtattactgtgcaaaagattgctgctccggtatcctctactacggtatggacgtctggggccaaggg

SEQ ID NO: 5686 - protein, 43 aa, Artificial Sequence
  Description of Artificial Sequence: Synthetic antibody
DNAKNSLYLQMNSLRAEDTALYYCAKDCCSGILYYGMDVWGQG

SEQ ID NO: 5687 - protein, 15 aa, Artificial Sequence
  Description of Artificial Sequence: Synthetic antibody
CARKNNWNYDLPDSW

SEQ ID NO: 5688 - DNA, 129 bp, Artificial Sequence
  Description of Artificial Sequence: Synthetic antibody
tccttggacacctctgtcagcacggcatatctgcagatcagcagcctaaaggctgagggcactgccgtgtattactgtgcgagaaaaaataattggaactacgatctccccgactcctggggccaggga

SEQ ID NO: 5689 - protein, 43 aa, Artificial Sequence
  Description of Artificial Sequence: Synthetic antibody
SLDTSVSTAYLQISSLKAEGTAVYYCARKNNWNYDLPDSWGQG

SEQ ID NO: 5690 - DNA, 129 bp, Artificial Sequence
  Description of Artificial Sequence: Synthetic antibody
tccttggacacctctgtcagcacggcatatctgcagatcagcagcctaaaggctgaggacactgccgtgtattactgtgcgagaaaaaataactggaactacgatctccccgactcctggggccaggga

SEQ ID NO: 5691 - protein, 43 aa, Artificial Sequence
  Description of Artificial Sequence: Synthetic antibody
SLDTSVSTAYLQISSLKAEDTAVYYCARKNNWNYDLPDSWGQG

SEQ ID NO: 5692 - protein, 21 aa, Artificial Sequence
  Description of Artificial Sequence: Synthetic antibody
CAKDPGYYYDSSGKNWYFDLW

SEQ ID NO: 5693 - DNA, 129 bp, Artificial Sequence
  Description of Artificial Sequence: Synthetic antibody
aacacgctgtatctgcaaatgaacagcctgagagccgaggacacggccgtatattactgtgcgaaagatcctgggtattactatgatagtagtggaaagaactggtacttcgatctctggggccgtggc

SEQ ID NO: 5694 - protein, 43 aa, Artificial Sequence
  Description of Artificial Sequence: Synthetic antibody
NTLYLQMNSLRAEDTAVYYCAKDPGYYYDSSGKNWYFDLWGRG

SEQ ID NO: 5695 - DNA, 129 bp, Artificial Sequence
  Description of Artificial Sequence: Synthetic antibody
aacacgatgtatctgcaaatgaacagcctgagagccgaggacacggccgtatattactgtgcgaaagatcctgggtattactatgatagtagtggaaagaactggtacttcgatctctggggccgtggc

SEQ ID NO: 5696 - protein, 43 aa, Artificial Sequence
  Description of Artificial Sequence: Synthetic antibody
NTMYLQMNSLRAEDTAVYYCAKDPGYYYDSSGKNWYFDLWGRG

SEQ ID NO: 5697 - protein, 15 aa, Artificial Sequence [sequence omitted]

SEQ ID NO: 5698 - DNA, 129 bp, Artificial Sequence
  Description of Artificial Sequence: Synthetic antibody
ctccaaggacacctccaaaaccaggtggtccttacaatgaccaacatggaccctgtggacacagccacgtattactgtgcacggatacgggcagcagctgggtactactttgactactggggccaggga

SEQ ID NO: 5699 - protein, 43 aa, Artificial Sequence
  Description of Artificial Sequence: Synthetic antibody
LQGHLQNQVVLTMTNMDPVDTATYYCARIRAAAGYYFDYWGQG

SEQ ID NO: 5700 - DNA, 129 bp, Artificial Sequence
  Description of Artificial Sequence: Synthetic antibody
tccaaggacacctccaaaaaccaggtggtccttacaatgaccaacatggaccctgtggacacagccacgtattactgtgcacggatacgggcagcagctgggtactactttgactactggggccaggga

SEQ ID NO: 5701 - protein, 43 aa, Artificial Sequence
  Description of Artificial Sequence: Synthetic antibody
SKDTSKNQVVLTMTNMDPVDTATYYCARIRAAAGYYFDYWGQG

SEQ ID NO: 5702 - protein, 17 aa, Artificial Sequence
  Description of Artificial Sequence: Synthetic antibody
CARRLISGTTLAPSDYW

SEQ ID NO: 5703 - DNA, 129 bp, Artificial Sequence
  Description of Artificial Sequence: Synthetic antibody
gacacgtccaagaaccagttctccctgaagctgaactctgtgaccgccgcagacacggctgtgtattactgtgcgagacgattgatctcagggactaccctggcccccagtgactactggggccaggga

SEQ ID NO: 5704 - protein, 43 aa, Artificial Sequence
  Description of Artificial Sequence: Synthetic antibody
DTSKNQFSLKLNSVTAADTAVYYCARRLISGTTLAPSDYWGQG

SEQ ID NO: 5705 - DNA, 129 bp, Artificial Sequence
  Description of Artificial Sequence: Synthetic antibody
gacacgcccaacaaccagttctccctgaagctgaactctgtgaccgccgcagacacggctgtgtattactgtgcgagacgattgatctcagggactaccctggcccccagtgactactggggccaggga

SEQ ID NO: 5706 - protein, 43 aa, Artificial Sequence
  Description of Artificial Sequence: Synthetic antibody
DTPNNQFSLKLNSVTAADTAVYYCARRLISGTTLAPSDYWGQG

SEQ ID NO: 5707 - protein, 19 aa, Artificial Sequence
  Description of Artificial Sequence: Synthetic antibody
CARVGSGDSSGYYLFPDYW

SEQ ID NO: 5708 - DNA, 129 bp, Artificial Sequence
  Description of Artificial Sequence: Synthetic antibody
tccatgagcacagtctacatggagctgagcagcctgagatctgaggacacggccgtgtattactgtgcgagagtagggtcgggtgatagtagtggttattacttgttccccgactactggggccaggga

SEQ ID NO: 5709 - protein, 43 aa, Artificial Sequence
  Description of Artificial Sequence: Synthetic antibody
SMSTVYMELSSLRSEDTAVYYCARVGSGDSSGYYLFPDYWGQG

SEQ ID NO: 5710 - DNA, 129 bp, Artificial Sequence
  Description of Artificial Sequence: Synthetic antibody
tccacgagcacagtctacatggagctgagcagcctgagatctgaggacacggccgtgtattactgtgcgagagtagggtcgggtgatagtagtggttattacttgttccccgactactggggccaggga

SEQ ID NO: 5711 - protein, 43 aa, Artificial Sequence
  Description of Artificial Sequence: Synthetic antibody
STSTVYMELSSLRSEDTAVYYCARVGSGDSSGYYLFPDYWGQG

SEQ ID NO: 5712 - protein, 16 aa, Artificial Sequence
  Description of Artificial Sequence: Synthetic antibody
CARPHGTAWYPWFDPW

SEQ ID NO: 5713 - DNA, 129 bp, Artificial Sequence
  Description of Artificial Sequence: Synthetic antibody
gttgacacgtccaagaaccagttctccctgaagctgaactctgtgaccgccgcagacacggctgtgtattactgtgcgagaccccatggcactgcctggtacccgtggttcgacccctggggccaggga

SEQ ID NO: 5714 - protein, 43 aa, Artificial Sequence
  Description of Artificial Sequence: Synthetic antibody
VDTSKNQFSLKLNSVTAADTAVYYCARPHGTAWYPWFDPWGQG

SEQ ID NO: 5715 - DNA, 129 bp, Artificial Sequence
  Description of Artificial Sequence: Synthetic antibody
gttgacacgcccaagaaccagttcaccctgaagctgaactctgtgaccgccgcagacacggctgtgtattactgtgcgagaccccatggcactgcctggtacccgtggttcgacccctggggccaggga

SEQ ID NO: 5716 - protein, 43 aa, Artificial Sequence
  Description of Artificial Sequence: Synthetic antibody
VDTPKNQFTLKLNSVTAADTAVYYCARPHGTAWYPWFDPWGQG

SEQ ID NO: 5717 - protein, 25 aa, Artificial Sequence
  Description of Artificial Sequence: Synthetic antibody
CARGTTLPSYDFWSGNSGYYGMDVW

SEQ ID NO: 5718 - DNA, 129 bp, Artificial Sequence
  Description of Artificial Sequence: Synthetic antibody
ttggagctgagcagcctgagatctgaggacacggccgtgtattactgtgcgagagggactacacttccgagttacgatttttggagtgggaactcaggctactacggtatggacgtctggggccaaggg

SEQ ID NO: 5719 - protein, 43 aa, Artificial Sequence
  Description of Artificial Sequence: Synthetic antibody
LELSSLRSEDTAVYYCARGTTLPSYDFWSGNSGYYGMDVWGQG

SEQ ID NO: 5720 - DNA, 129 bp, Artificial Sequence
  Description of Artificial Sequence: Synthetic antibody
atggagctgagcagcctgagatctgaggacacggccgtgtattactgtgcgagagggactacacttccgagttacgatttttggagtgggaactcaggctactacggtatggacgtctggggccaaggg

SEQ ID NO: 5721 - protein, 43 aa, Artificial Sequence
  Description of Artificial Sequence: Synthetic antibody
MELSSLRSEDTAVYYCARGTTLPSYDFWSGNSGYYGMDVWGQG

SEQ ID NO: 5722 - protein, 19 aa, Artificial Sequence
  Description of Artificial Sequence: Synthetic antibody
CARDPTPVVVLQGHAFDIW

SEQ ID NO: 5723 - DNA, 129 bp, Artificial Sequence
  Description of Artificial Sequence: Synthetic antibody
tccacgagcacagcctacatggagctgagcagcctgagatctgaggacacggccgtgtattactgtgcgagagatccaactcctgtagtggttctacaggggcatgcttttgatatctggggccaaggg

SEQ ID NO: 5724 - protein, 43 aa, Artificial Sequence
  Description of Artificial Sequence: Synthetic antibody
STSTAYMELSSLRSEDTAVYYCARDPTPVVVLQGHAFDIWGQG

SEQ ID NO: 5725 - DNA, 129 bp, Artificial Sequence
  Description of Artificial Sequence: Synthetic antibody
tccacgagcaaagcctacatggagctgagcagcctgagatctgaggacacggccgtgtattactgtgcgagagatccaactcctgtagtggttctacaggggcatgcttttgatatctggggccaaggg

SEQ ID NO: 5726 - protein, 43 aa, Artificial Sequence
  Description of Artificial Sequence: Synthetic antibody
STSKAYMELSSLRSEDTAVYYCARDPTPVVVLQGHAFDIWGQG

SEQ ID NO: 5727 - protein, 20 aa, Artificial Sequence
  Description of Artificial Sequence: Synthetic antibody
CARAPAAAGDYYYYYGMDVW

SEQ ID NO: 5728 - DNA, 129 bp, Artificial Sequence
  Description of Artificial Sequence: Synthetic antibody
acgagcacagcctacatggagctgagcagcctgagatctgaggacacggccgtgtattactgtgcgagggcccccgcagcagctggggattactactactactacggtatggacgtctggggccaaggg

SEQ ID NO: 5729 - protein, 43 aa, Artificial Sequence
  Description of Artificial Sequence: Synthetic antibody
TSTAYMELSSLRSEDTAVYYCARAPAAAGDYYYYYGMDVWGQG

SEQ ID NO: 5730 - DNA, 129 bp, Artificial Sequence
  Description of Artificial Sequence: Synthetic antibody
acgaccaccgcctacatggagctgagcagcctgagatctgaggacacggccgtgtattactgtgcgagggcccccgcagcagctggggattactactactactacggtatggacgtctggggccaaggg

SEQ ID NO: 5731 - protein, 43 aa, Artificial Sequence
  Description of Artificial Sequence: Synthetic antibody
TTTAYMELSSLRSEDTAVYYCARAPAAAGDYYYYYGMDVWGQG

SEQ ID NO: 5732 - protein, 12 aa, Artificial Sequence
  Description of Artificial Sequence: Synthetic antibody
CAKVITIGPDYW

SEQ ID NO: 5733 - DNA, 129 bp, Artificial Sequence
  Description of Artificial Sequence: Synthetic antibody
ttcaccatctccagagacaattccaagaacacgctgtatctgcaaatgaacagcctgagagccgaggacacggccgtatattactgtgcgaaagttattacgataggacctgactactggggccaggga

SEQ ID NO: 5734 - protein, 43 aa, Artificial Sequence
  Description of Artificial Sequence: Synthetic antibody
FTISRDNSKNTLYLQMNSLRAEDTAVYYCAKVITIGPDYWGQG

SEQ ID NO: 5735 - DNA, 129 bp, Artificial Sequence
  Description of Artificial Sequence: Synthetic antibody
ttcaccatctccagacacaattccaagaacacgctgtatctgcaaatcaacagcctgagagccgaggacacggccgtatattactgtgcgaaagttattacgataggacctgactactggggccaggga

SEQ ID NO: 5736 - protein, 43 aa, Artificial Sequence
  Description of Artificial Sequence: Synthetic antibody
FTISRHNSKNTLYLQINSLRAEDTAVYYCAKVITIGPDYWGQG

SEQ ID NO: 5737 - protein, 10 aa, Artificial Sequence [sequence omitted]

SEQ ID NO: 5738 - DNA, 129 bp, Artificial Sequence
  Description of Artificial Sequence: Synthetic antibody
ggcagagtcaccatgaccaggaacacctccataagcacagcctacatggagctgagcagcctgagatctgaggacacggccgtgtattactgtgcgaggacggactggttcgacccctggggccaggga

SEQ ID NO: 5739 - protein, 43 aa, Artificial Sequence
  Description of Artificial Sequence: Synthetic antibody
GRVTMTRNTSISTAYMELSSLRSEDTAVYYCARTDWFDPWGQG

SEQ ID NO: 5740 - DNA, 129 bp, Artificial Sequence
  Description of Artificial Sequence: Synthetic antibody
ggcagagacaccatgaccagcaacacctccataagcacagcctacatggagctgagcagcctgagatctgaggacacggccgtgtattactgtgcgaggacggactggttcgacccctggggccaggga

SEQ ID NO: 5741 - protein, 43 aa, Artificial Sequence
  Description of Artificial Sequence: Synthetic antibody
GRDTMTSNTSISTAYMELSSLRSEDTAVYYCARTDWFDPWGQG

SEQ ID NO: 5742 - protein, 15 aa, Artificial Sequence
  Description of Artificial Sequence: Synthetic antibody
CATGGVFPVGWLDPW

SEQ ID NO: 5743 - DNA, 129 bp, Artificial Sequence
  Description of Artificial Sequence: Synthetic antibody
tccagagacaattccaagaacacgctgtatctgcaaatgaacagcctgagagccgaggacacggccgtatattactgtgcgaccgggggggttttcccggtcggctggctcgacccctggggccaggga

SEQ ID NO: 5744 - protein, 43 aa, Artificial Sequence
  Description of Artificial Sequence: Synthetic antibody
SRDNSKNTLYLQMNSLRAEDTAVYYCATGGVFPVGWLDPWGQG

SEQ ID NO: 5745 - DNA, 129 bp, Artificial Sequence
  Description of Artificial Sequence: Synthetic antibody
tacagagaaaattccaagaacacgctgtatctgcaaatgaacagcctgagagccgaggacacggccgtatattactgtgcgaccgggggggttttcccggtcggctggctcgacccctggggccaggga

SEQ ID NO: 5746 - protein, 43 aa, Artificial Sequence
  Description of Artificial Sequence: Synthetic antibody
YRENSKNTLYLQMNSLRAEDTAVYYCATGGVFPVGWLDPWGQG

SEQ ID NO: 5747 - protein, 22 aa, Artificial Sequence
  Description of Artificial Sequence: Synthetic antibody
CARGRLGRAAAGKGRAYYFDYW

SEQ ID NO: 5748 - DNA, 129 bp, Artificial Sequence
  Description of Artificial Sequence: Synthetic antibody
ctgttctccctgatgctgagctctgtgaccgccgcggacacggctgtgtattactgtgcgagaggccggttggggcgggcagcagctggtaagggccgcgcctactactttgactactggggccaggga

SEQ ID NO: 5749 - protein, 43 aa, Artificial Sequence
  Description of Artificial Sequence: Synthetic antibody
LFSLMLSSVTAADTAVYYCARGRLGRAAAGKGRAYYFDYWGQG

SEQ ID NO: 5750 - DNA, 129 bp, Artificial Sequence
  Description of Artificial Sequence: Synthetic antibody
cagttctccctgaagctgagctctgtgaccgccgcggacacggctgtgtattactgtgcgagaggccggttggggcgggcagcagctggtaagggccgcgcctactactttgactactggggccaggga

SEQ ID NO: 5751 - protein, 43 aa, Artificial Sequence
  Description of Artificial Sequence: Synthetic antibody
QFSLKLSSVTAADTAVYYCARGRLGRAAAGKGRAYYFDYWGQG

SEQ ID NO: 5752 - protein, 8 aa, Artificial Sequence
  Description of Artificial Sequence: Synthetic antibody
CAKEEGPW

SEQ ID NO: 5753 - DNA, 129 bp, Artificial Sequence
  Description of Artificial Sequence: Synthetic antibody
gtgaagggcctattcaccatctccagagacaacgccaagaactccctgtatcttcaaatgaacagtctgagagctgaggacacggccttgtattactgtgcaaaagaagagggcccctggggccaggga

SEQ ID NO: 5754 - protein, 43 aa, Artificial Sequence
  Description of Artificial Sequence: Synthetic antibody
VKGLFTISRDNAKNSLYLQMNSLRAEDTALYYCAKEEGPWGQG

SEQ ID NO: 5755 - DNA, 129 bp, Artificial Sequence
  Description of Artificial Sequence: Synthetic antibody
gtgaagggccgattcaccatctccagagacaacgccaagaactccctgtatctgcaaatgaacagtctgagagctgaggacacggccttgtattactgtgcaaaagaagagggcccctggggccaggga

SEQ ID NO: 5756 - protein, 43 aa, Artificial Sequence
  Description of Artificial Sequence: Synthetic antibody
VKGRFTISRDNAKNSLYLQMNSLRAEDTALYYCAKEEGPWGQG

SEQ ID NO: 5757 - protein, 13 aa, Artificial Sequence
  Description of Artificial Sequence: Synthetic antibody
CARQDAGASCIDW

SEQ ID NO: 5758 - DNA, 129 bp, Artificial Sequence
  Description of Artificial Sequence: Synthetic antibody
accatctcagccgacaagtccatcaccaccgcctacctacagttgaacagcctggaggcctcggacaccgccatctattactgtgcgagacaggatgctggtgctagttgcatcgactggggccaggga

SEQ ID NO: 5759 - protein, 43 aa, Artificial Sequence
  Description of Artificial Sequence: Synthetic antibody
TISADKSITTAYLQLNSLEASDTAIYYCARQDAGASCIDWGQG

SEQ ID NO: 5760 - DNA, 129 bp, Artificial Sequence
  Description of Artificial Sequence: Synthetic antibody
ccatctcagccgacaagtccatccaccaccgcctacctacagttgaacagcctggaggcctcggacaccgccatctattactgtgcgagacaggatgctggtgctagttgcatcgactggggccaggga

SEQ ID NO: 5761 - protein, 43 aa, Artificial Sequence
  Description of Artificial Sequence: Synthetic antibody
PSQPTSPSTTAYLQLNSLEASDTAIYYCARQDAGASCIDWGQG

SEQ ID NO: 5762 - protein, 13 aa, Artificial Sequence
  Description of Artificial Sequence: Synthetic antibody
CTTDPYDFWTDYW

SEQ ID NO: 5763 - DNA, 129 bp, Artificial Sequence
  Description of Artificial Sequence: Synthetic antibody
accatctcaagagatgattcaaaaaacacgctgtatctgcaaatgaacagcctgaaaaccgaggacacagccgtgtattactgtaccacagacccatacgatttttggactgactactggggccaggga

SEQ ID NO: 5764 - protein, 43 aa, Artificial Sequence
  Description of Artificial Sequence: Synthetic antibody
TISRDDSKNTLYLQMNSLKTEDTAVYYCTTDPYDFWTDYWGQG

SEQ ID NO: 5765 - DNA, 129 bp, Artificial Sequence
  Description of Artificial Sequence: Synthetic antibody
accatctcaagagatgattcaaaaaacacgctgtatctgcaaatgaacagcctgaaaaccgaggacacagccgtgcattactgtaccacagacccatacgatttttggactgactactggggccaggga

SEQ ID NO: 5766 - protein, 43 aa, Artificial Sequence
  Description of Artificial Sequence: Synthetic antibody
TISRDDSKNTLYLQMNSLKTEDTAVHYCTTDPYDFWTDYWGQG

SEQ ID NO: 5767 - protein, 17 aa, Artificial Sequence
  Description of Artificial Sequence: Synthetic antibody
CAHSYPFMTTVTYFDYW

SEQ ID NO: 5768 - DNA, 129 bp, Artificial Sequence
  Description of Artificial Sequence: Synthetic antibody
gacacctccaaaaaccaggtggtccttacaatgaccaacatggaccctgtggacacagccacatattactgtgcacacagttacccctttatgactacggtgacctactttgactactggggccaggga

SEQ ID NO: 5769 - protein, 43 aa, Artificial Sequence
  Description of Artificial Sequence: Synthetic antibody
DTSKNQVVLTMTNMDPVDTATYYCAHSYPFMTTVTYFDYWGQG

SEQ ID NO: 5770 - DNA, 129 bp, Artificial Sequence
  Description of Artificial Sequence: Synthetic antibody
ggacacctccaaaaccaggtggtccttacaatgaccaacatggaccctgtggacacagccacatattactgtgcacacagttacccctttatgactacggtgacctactttgactactggggccaggga

SEQ ID NO: 5771 - protein, 43 aa, Artificial Sequence
  Description of Artificial Sequence: Synthetic antibody
GHLQNQVVLTMTNMDPVDTATYYCAHSYPFMTTVTYFDYWGQG

SEQ ID NO: 5772 - protein, 15 aa, Artificial Sequence
  Description of Artificial Sequence: Synthetic antibody
CIPGYSSGLRLLDYW

SEQ ID NO: 5773 - DNA, 129 bp, Artificial Sequence
  Description of Artificial Sequence: Synthetic antibody
tccagagattattcaaacaacacggcgtatctgcaaatgaacagcctgaaaaccgaggacacggccgtgtattactgtattcccgggtatagcagtggcctgaggctacttgactactggggccaggga

SEQ ID NO: 5774 - protein, 43 aa, Artificial Sequence
  Description of Artificial Sequence: Synthetic antibody
SRDYSNNTAYLQMNSLKTEDTAVYYCIPGYSSGLRLLDYWGQG

SEQ ID NO: 5775 - DNA, 129 bp, Artificial Sequence
  Description of Artificial Sequence: Synthetic antibody
tccagagatgattcaaagaacacggcgtatctgcaaatgaacagcctgaaaaccgaggacacggccgtgtattactgtattcccgggtatagcagtggcctgaggctacttgactactggggccaggga

SEQ ID NO: 5776 - protein, 43 aa, Artificial Sequence
  Description of Artificial Sequence: Synthetic antibody
SRDDSKNTAYLQMNSLKTEDTAVYYCIPGYSSGLRLLDYWGQG

SEQ ID NO: 5777 - protein, 11 aa, Artificial Sequence
  Description of Artificial Sequence: Synthetic antibody
CARNLLFADFW

SEQ ID NO: 5778 - DNA, 129 bp, Artificial Sequence
  Description of Artificial Sequence: Synthetic antibody
ttaatcaccctgaccatggacacgtccacgagcacagtctacatggaactgagcagcctgagatctgaggacacggccgtgtattactgtgcgagaaaccttctttttgcggacttctggggccaggga

SEQ ID NO: 5779 - protein, 43 aa, Artificial Sequence
  Description of Artificial Sequence: Synthetic antibody
LITLTMDTSTSTVYMELSSLRSEDTAVYYCARNLLFADFWGQG

SEQ ID NO: 5780 - DNA, 129 bp, Artificial Sequence
  Description of Artificial Sequence: Synthetic antibody
agaatcaccctgaccatggacacgtccacgagcacagtctacatggaactgagcagcctgagatctgaggacacggccgtgtattactgtgcgagaaaccttctttttgcggacttctggggccaggga

SEQ ID NO: 5781 - protein, 43 aa, Artificial Sequence
  Description of Artificial Sequence: Synthetic antibody
RITLTMDTSTSTVYMELSSLRSEDTAVYYCARNLLFADFWGQG

SEQ ID NO: 5782 - protein, 14 aa, Artificial Sequence
  Description of Artificial Sequence: Synthetic antibody
CASYSNSWSSWDYW

SEQ ID NO: 5783 - DNA, 129 bp, Artificial Sequence
  Description of Artificial Sequence: Synthetic antibody
atatcagtagacacgtccaaaaaccagttctccctgaagctgagctctgtgaccgccgcggacacggccgtgtattactgtgccagttatagtaacagctggtcgagttgggactactggggccaggga

SEQ ID NO: 5784 - protein, 43 aa, Artificial Sequence
  Description of Artificial Sequence: Synthetic antibody
ISVDTSKNQFSLKLSSVTAADTAVYYCASYSNSWSSWDYWGQG

SEQ ID NO: 5785 - DNA, 129 bp, Artificial Sequence
  Description of Artificial Sequence: Synthetic antibody
acatcagtagacacgtccaaaaaccagttctccctgaagctgagctctgtgaccgccgcggacacggccgtgtattactgtgccagttatagtaacagctggtcgagttgggactactggggccaggga

SEQ ID NO: 5786 - protein, 43 aa, Artificial Sequence
  Description of Artificial Sequence: Synthetic antibody
TSVDTSKNQFSLKLSSVTAADTAVYYCASYSNSWSSWDYWGQG

SEQ ID NO: 5787 - protein, 13 aa, Artificial Sequence
  Description of Artificial Sequence: Synthetic antibody
CAKFIAAAGFDYW

SEQ ID NO: 5788 - DNA, 129 bp, Artificial Sequence
  Description of Artificial Sequence: Synthetic antibody
accatctccatatataattccaagaacacgctgtatctgcaaatgaacagcctgagagccgaggacacggccgtatattactgtgcgaaatttatagcagcagctggttttgactactggggccaggga

SEQ ID NO: 5789 - protein, 43 aa, Artificial Sequence
  Description of Artificial Sequence: Synthetic antibody
TISIYNSKNTLYLQMNSLRAEDTAVYYCAKFIAAAGFDYWGQG

SEQ ID NO: 5790 - DNA, 129 bp, Artificial Sequence
  Description of Artificial Sequence: Synthetic antibody
accatctccagagataattccaagaacacgctgtatctgcaaatgaacagcctgagagccgaggacacggccgtatattactgtgcgaaatttatagcagcagctggttttgactactggggccaggga

SEQ ID NO: 5791 - protein, 43 aa, Artificial Sequence
  Description of Artificial Sequence: Synthetic antibody
TISRDNSKNTLYLQMNSLRAEDTAVYYCAKFIAAAGFDYWGQG

SEQ ID NO: 5792 - protein, 21 aa, Artificial Sequence
  Description of Artificial Sequence: Synthetic antibody
CARALRSGQGSSPSNNWFDPW

SEQ ID NO: 5793 - DNA, 129 bp, Artificial Sequence
  Description of Artificial Sequence: Synthetic antibody
aaccagttctccctgaagctgagctctgtgaccgccgcggacacggctgtgtattactgtgcgagagccctgcgatcaggccagggcagcagcccctcgaacaactggttcgacccctggggccaggga

SEQ ID NO: 5794 - protein, 43 aa, Artificial Sequence
  Description of Artificial Sequence: Synthetic antibody
NQFSLKLSSVTAADTAVYYCARALRSGQGSSPSNNWFDPWGQG

SEQ ID NO: 5795 - DNA, 129 bp, Artificial Sequence
  Description of Artificial Sequence: Synthetic antibody
aaccagttctccccgaagctgagctctgtgaccgccgcggacacggctgtgtattactgtgcgagagccctgcgatcaggccagggcagcagcccctcgaacaactggttcgacccctggggccaggga

SEQ ID NO: 5796 - protein, 43 aa, Artificial Sequence
  Description of Artificial Sequence: Synthetic antibody
NQFSPKLSSVTAADTAVYYCARALRSGQGSSPSNNWFDPWGQG

SEQ ID NO: 5797 - protein, 20 aa, Artificial Sequence
  Description of Artificial Sequence: Synthetic antibody
CAKGPIVVVPAAIRNPPDYW

SEQ ID NO: 5798 - DNA, 129 bp, Artificial Sequence
  Description of Artificial Sequence: Synthetic antibody
aagaacacgctgtatctgcaaatgaacagcctgagagccgaggacacggccgtatattactgtgccaaggggccgattgtagtagtaccagctgctatacgtaatcccccagactactggggccaggga

SEQ ID NO: 5799 - protein, 43 aa, Artificial Sequence
  Description of Artificial Sequence: Synthetic antibody
KNTLYLQMNSLRAEDTAVYYCAKGPIVVVPAAIRNPPDYWGQG

SEQ ID NO: 5800 - DNA, 129 bp, Artificial Sequence
  Description of Artificial Sequence: Synthetic antibody
aagaacacgctgtatctacaaatgaacagcctgagagccgaggacacggccgtatattactgtgccaaggggccgattgtagtagtaccagctgctatacgtaatcccccagactactggggccaggga

SEQ ID NO: 5801 - protein, 15 aa, Artificial Sequence
  Description of Artificial Sequence: Synthetic antibody
CARRGSSWSWAFDPW

SEQ ID NO: 5802 - DNA, 129 bp, Artificial Sequence
  Description of Artificial Sequence: Synthetic antibody
tcagccgacagctccagcagcaccgcctacctgcagtggagcagcctgaaggcctcggacaccgccatgtattactgtgcgagacgtggcagcagctggtcatgggccttcgacccctggggccaggga

SEQ ID NO: 5803 - protein, 43 aa, Artificial Sequence
  Description of Artificial Sequence: Synthetic antibody
SADSSSSTAYLQWSSLKASDTAMYYCARRGSSWSWAFDPWGQG

SEQ ID NO: 5804 - DNA, 129 bp, Artificial Sequence
  Description of Artificial Sequence: Synthetic antibody
tcagccgacaagtccatcagcaccgcctacctgcagtggagcagcctgaaggcctcggacaccgccatgtattactgtgcgagacgtggcagcagctggtcatgggccttcgacccctggggccaggga

SEQ ID NO: 5805 - protein, 43 aa, Artificial Sequence
  Description of Artificial Sequence: Synthetic antibody
SADKSISTAYLQWSSLKASDTAMYYCARRGSSWSWAFDPWGQG

SEQ ID NO: 5806 - protein, 17 aa, Artificial Sequence
  Description of Artificial Sequence: Synthetic antibody
CARDIDAPGTTYYFDYW

SEQ ID NO: 5807 - DNA, 129 bp, Artificial Sequence
  Description of Artificial Sequence: Synthetic antibody
gacaacgccaagaactccctgtatctgcaaatggactccctgagagccgaggacacggccgtgtactactgtgcgagagatatagacgcgcctggaacgacctattactttgactactggggccaggga

SEQ ID NO: 5808 - protein, 43 aa, Artificial Sequence
  Description of Artificial Sequence: Synthetic antibody
DNAKNSLYLQMDSLRAEDTAVYYCARDIDAPGTTYYFDYWGQG

SEQ ID NO: 5809 - DNA, 129 bp, Artificial Sequence
  Description of Artificial Sequence: Synthetic antibody
gacaacgccaacaactccctgtatctgcaaatggactccctgagagccgaggacacggccgtgtactactgtgcgagagatatagacgcgcctggaacgacctattactttgactactggggccaggga

SEQ ID NO: 5810 - protein, 43 aa, Artificial Sequence
  Description of Artificial Sequence: Synthetic antibody
DNANNSLYLQMDSLRAEDTAVYYCARDIDAPGTTYYFDYWGQG

SEQ ID NO: 5811 - protein, 21 aa, Artificial Sequence
  Description of Artificial Sequence: Synthetic antibody
CARVRPVVATMFLNYYGMDVW

SEQ ID NO: 5812 - DNA, 129 bp, Artificial Sequence
  Description of Artificial Sequence: Synthetic antibody
tgcacagtctacttggagctgagcagcctgagatctgaggacacggccgtgtattactgtgcgagagttcggccggtagtggctacgatgttcctaaactactacggtatggacgtctggggccaaggg

SEQ ID NO: 5813 - protein, 43 aa, Artificial Sequence
  Description of Artificial Sequence: Synthetic antibody
CTVYLELSSLRSEDTAVYYCARVRPVVATMFLNYYGMDVWGQG

SEQ ID NO: 5814 - DNA, 129 bp, Artificial Sequence
  Description of Artificial Sequence: Synthetic antibody
agcacagtctacatggagctgagcagcctgagatctgaggacacggccgtgtattactgtgcgagagttcggccggtagtggctacgatgttcctaaactactacggtatggacgtctggggccaaggg

SEQ ID NO: 5815 - protein, 43 aa, Artificial Sequence
  Description of Artificial Sequence: Synthetic antibody
STVYMELSSLRSEDTAVYYCARVRPVVATMFLNYYGMDVWGQG

SEQ ID NO: 5816 - protein, 18 aa, Artificial Sequence
  Description of Artificial Sequence: Synthetic antibody
CARLSTQQWLPEDAFDMW

SEQ ID NO: 5817 - DNA, 129 bp, Artificial Sequence
  Description of Artificial Sequence: Synthetic antibody
aaatccatctgtaccgcctacttgcagcggagtagtctgcaggtctcggacaccgccatatattactgtgcgagactgtcgactcagcagtggctgccagaagatgcttttgatatgtggggccaaggg

SEQ ID NO: 5818 - protein, 43 aa, Artificial Sequence
  Description of Artificial Sequence: Synthetic antibody
KSICTAYLQRSSLQVSDTAIYYCARLSTQQWLPEDAFDMWGQG

SEQ ID NO: 5819 - DNA, 129 bp, Artificial Sequence
  Description of Artificial Sequence: Synthetic antibody
aaatccatcagtaccgcctacatgcagcggagtagtctgcaggtctcggacaccgccatatattactgtgcgagactgtcgactcagcagtggctgccagaagatgcttttgatatgtggggccaaggg

SEQ ID NO: 5820 - protein, 43 aa, Artificial Sequence
  Description of Artificial Sequence: Synthetic antibody
KSISTAYMQRSSLQVSDTAIYYCARLSTQQWLPEDAFDMWGQG

SEQ ID NO: 5821 - protein, 18 aa, Artificial Sequence
  Description of Artificial Sequence: Synthetic antibody
CTTDLYRYSSSWDYFDYW

SEQ ID NO: 5822 - DNA, 129 bp, Artificial Sequence
  Description of Artificial Sequence: Synthetic antibody
gattcaaaaaacacgctgtatctgcaaatgaacagcctgaaaaccgaggacacagccgtgtattattgtaccacagatctatataggtatagcagcagctgggactactttgactactggggccaggga

SEQ ID NO: 5823 - protein, 43 aa, Artificial Sequence
  Description of Artificial Sequence: Synthetic antibody
DSKNTLYLQMNSLKTEDTAVYYCTTDLYRYSSSWDYFDYWGQG

SEQ ID NO: 5824 - DNA, 129 bp, Artificial Sequence
  Description of Artificial Sequence: Synthetic antibody
gattcaaaaaacacgctgtatctgcaaatgaacagcctgaaaaccgaggacacagccgtgtattactgtaccacagatctatataggtatagcagcagctgggactactttgactactggggccaggga

SEQ ID NO: 5825 - protein, 13 aa, Artificial Sequence
  Description of Artificial Sequence: Synthetic antibody
CTRQLGGSGSDYW

SEQ ID NO: 5826 - DNA, 129 bp, Artificial Sequence
  Description of Artificial Sequence: Synthetic antibody
atcatcagcccagacacatccaagaaccagttctccctgcaattgaactctgtgactcccgacgacacggctgtgtattactgtacaagacagctcggtggttcaggatctgattactggggccaggga

SEQ ID NO: 5827 - protein, 43 aa, Artificial Sequence
  Description of Artificial Sequence: Synthetic antibody
IISPDTSKNQFSLQLNSVTPDDTAVYYCTRQLGGSGSDYWGQG

SEQ ID NO: 5828 - DNA, 129 bp, Artificial Sequence
  Description of Artificial Sequence: Synthetic antibody
atcatcaacccagacacatccaagaaccagttctccctgcaactgaactctgtgactcccgaggacacggctgtgtattactgtacaagacaactcggtggttcaggatctgattactggggccaggga

SEQ ID NO: 5829 - protein, 43 aa, Artificial Sequence
  Description of Artificial Sequence: Synthetic antibody
IINPDTSKNQFSLQLNSVTPEDTAVYYCTRQLGGSGSDYWGQG

SEQ ID NO: 5830 - protein, 25 aa, Artificial Sequence
  Description of Artificial Sequence: Synthetic antibody
CARGQEEGYSSSWYRGYYYYGMDVW

SEQ ID NO: 5831 - DNA, 129 bp, Artificial Sequence
  Description of Artificial Sequence: Synthetic antibody
ttggagctgaggagcctgagatctgacgacacggccgtgtattactgtgcgagaggccaggaggaggggtatagcagcagctggtaccggggctactactactacggtatggacgtctggggccaaggg

SEQ ID NO: 5832 - protein, 43 aa, Artificial Sequence
  Description of Artificial Sequence: Synthetic antibody
LELRSLRSDDTAVYYCARGQEEGYSSSWYRGYYYYGMDVWGQG

SEQ ID NO: 5833 - DNA, 129 bp, Artificial Sequence
  Description of Artificial Sequence: Synthetic antibody
atggagctgaggagcctgagatctgacgacacggccgtgtattactgtgcgagaggccaggaggaggggtatagcagcagctggtaccggggctactactactacggtatggacgtctggggccaaggg

SEQ ID NO: 5834 - protein, 43 aa, Artificial Sequence
  Description of Artificial Sequence: Synthetic antibody
MELRSLRSDDTAVYYCARGQEEGYSSSWYRGYYYYGMDVWGQG

SEQ ID NO: 5835 - protein, 16 aa, Artificial Sequence
  Description of Artificial Sequence: Synthetic antibody
CAHSLSPYSPAWFDPW

SEQ ID NO: 5836 - DNA, 129 bp, Artificial Sequence
  Description of Artificial Sequence: Synthetic antibody
caaggacacctccaaaaccaggtggtccttacaatgaccaacatggaccctgtggacacagccacatattactgtgcacacagtctgagtccttatagccccgcctggttcgacccctggggccaggga

SEQ ID NO: 5837 - protein, 43 aa, Artificial Sequence
  Description of Artificial Sequence: Synthetic antibody
QGHLQNQVVLTMTNMDPVDTATYYCAHSLSPYSPAWFDPWGQG

SEQ ID NO: 5838 - DNA, 129 bp, Artificial Sequence
  Description of Artificial Sequence: Synthetic antibody
aaggacacctccaaaaaccaggtggtccttacaatgaccaacatggaccctgtggacacagccacatattactgtgcacacagtctgagtccttatagccccgcctggttcgacccctggggccaggga

SEQ ID NO: 5839 - protein, 43 aa, Artificial Sequence
  Description of Artificial Sequence: Synthetic antibody
KDTSKNQVVLTMTNMDPVDTATYYCAHSLSPYSPAWFDPWGQG

SEQ ID NO: 5840 - protein, 18 aa, Artificial Sequence
  Description of Artificial Sequence: Synthetic antibody
CAKGRSSWPYYYYGMDVW

SEQ ID NO: 5841 - DNA, 129 bp, Artificial Sequence
  Description of Artificial Sequence: Synthetic antibody
aattccaagaacacgctgtatctgcaaatgaacagcctgagagccgaggacacggccgtatattactgtgcgaaggggcgcagcagctggccctactactactacggtatggacgtctggggccaaggg

SEQ ID NO: 5842 - protein, 43 aa, Artificial Sequence
  Description of Artificial Sequence: Synthetic antibody
NSKNTLYLQMNSLRAEDTAVYYCAKGRSSWPYYYYGMDVWGQG

SEQ ID NO: 5843 - DNA, 129 bp, Artificial Sequence
  Description of Artificial Sequence: Synthetic antibody
aattccaagaacacgctgtatctgcaaatgaacagcctgagagccgaggacacggccgtatattactgtgcgaaagggcgcagcagctggccctactactactacggtatggacgtctggggccaaggg

SEQ ID NO: 5844 - protein, 19 aa, Artificial Sequence
  Description of Artificial Sequence: Synthetic antibody
CAKDLGSGSSAYYYGMDVW

SEQ ID NO: 5845 - DNA, 129 bp, Artificial Sequence
  Description of Artificial Sequence: Synthetic antibody
gccaagaactccctgtatctgcaaatgaacagtctgagagctgaggacacggccttgtattactgtgcaaaagatcttggttcggggagctcagcgtactactacggtatggacgtctggggccaaggg

SEQ ID NO: 5846 - protein, 43 aa, Artificial Sequence
  Description of Artificial Sequence: Synthetic antibody
AKNSLYLQMNSLRAEDTALYYCAKDLGSGSSAYYYGMDVWGQG

SEQ ID NO: 5847 - DNA, 129 bp, Artificial Sequence
  Description of Artificial Sequence: Synthetic antibody
gccaagaactccctgtatctgcaaatgaacagcctgagagctgaggacacggccttgtattactgtgcaaaagatcttggttcggggagctcagcgtactactacggtatggacgtctggggccaagga

SEQ ID NO: 5848 - protein, 22 aa, Artificial Sequence
  Description of Artificial Sequence: Synthetic antibody
CARGAPDSSGYYFQGEVYFDYW

SEQ ID NO: 5849 - DNA, 129 bp, Artificial Sequence
  Description of Artificial Sequence: Synthetic antibody
tcgctgtatcttctaatgggcagcctgagagctgaggacatggctgtgtattactgtgcgagaggggcccctgatagtagtggttattacttccaaggggaggtctactttgactactggggccaggga

SEQ ID NO: 5850 - protein, 43 aa, Artificial Sequence
  Description of Artificial Sequence: Synthetic antibody
SLYLLMGSLRAEDMAVYYCARGAPDSSGYYFQGEVYFDYWGQG

SEQ ID NO: 5851 - DNA, 129 bp, Artificial Sequence
  Description of Artificial Sequence: Synthetic antibody
acgctgtatcttcaaatgggcagcctgagagctgaggacatggctgtgtattactgtgcgagaggggcccctgatagtagtggttattacttccaaggggaggtctactttgactactggggccaggga

SEQ ID NO: 5852 - protein, 43 aa, Artificial Sequence
  Description of Artificial Sequence: Synthetic antibody
TLYLQMGSLRAEDMAVYYCARGAPDSSGYYFQGEVYFDYWGQG

SEQ ID NO: 5853 - protein, 19 aa, Artificial Sequence
  Description of Artificial Sequence: Synthetic antibody
CAILARTSYFDWSKIFDYW

SEQ ID NO: 5854 - DNA, 129 bp, Artificial Sequence
  Description of Artificial Sequence: Synthetic antibody
tccatcagcacagcctacatggagctgagcaggctgagatctgacgacacggccgtgtattactgtgcgatcctagcccggacctcctattttgactggtcaaaaatctttgactactggggccgggga

SEQ ID NO: 5855 - protein, 43 aa, Artificial Sequence
  Description of Artificial Sequence: Synthetic antibody
SISTAYMELSRLRSDDTAVYYCAILARTSYFDWSKIFDYWGRG

SEQ ID NO: 5856 - DNA, 129 bp, Artificial Sequence
  Description of Artificial Sequence: Synthetic antibody
tccatcagcacagcctacatggagctgagcaggctgagatctgacgacacggccgtgtattactgtgcgatcctagcccggacctcctattttgactggtcaaaaatctttgactactggggccaggga

SEQ ID NO: 5857 - protein, 43 aa, Artificial Sequence
  Description of Artificial Sequence: Synthetic antibody
SISTAYMELSRLRSDDTAVYYCAILARTSYFDWSKIFDYWGQG

SEQ ID NO: 5858 - protein, 17 aa, Artificial Sequence
  Description of Artificial Sequence: Synthetic antibody
CARLVVSAAGNSHFDYW

SEQ ID NO: 5859 - DNA, 129 bp, Artificial Sequence
  Description of Artificial Sequence: Synthetic antibody
gacaagtccatcagcaccgcctacctgcagtggagcagcctgaaggcctcggacaccgccatgtattactgtgcgagacttgtggttagtgcagctggcaactctcactttgactactggggccaggga

SEQ ID NO: 5860 - protein, 43 aa, Artificial Sequence
  Description of Artificial Sequence: Synthetic antibody
DKSISTAYLQWSSLKASDTAMYYCARLVVSAAGNSHFDYWGQG

SEQ ID NO: 5861 - DNA, 129 bp, Artificial Sequence
  Description of Artificial Sequence: Synthetic antibody
gacaagtccatcagcaccgcctacctgcagtggagcagcctgaaggcctcggacaccgccatgtattactgtgcgagacttgtggttagtgcagctggcaactcccactttgactactggggccgggga

SEQ ID NO: 5862 - protein, 43 aa, Artificial Sequence
  Description of Artificial Sequence: Synthetic antibody
DKSISTAYLQWSSLKASDTAMYYCARLVVSAAGNSHFDYWGRG

SEQ ID NO: 5863 - protein, 19 aa, Artificial Sequence
  Description of Artificial Sequence: Synthetic antibody
CAREPPPTMTTVVTILDYW

SEQ ID NO: 5864 - DNA, 129 bp, Artificial Sequence
  Description of Artificial Sequence: Synthetic antibody
tccacgagcacagtctacatggagctgagcagcctgagatctgaggacacggccgtgtattactgtgcgagggaacccccccccaccatgactacggtggtaacgattctggactactggggccaggga

SEQ ID NO: 5865 - protein, 43 aa, Artificial Sequence
  Description of Artificial Sequence: Synthetic antibody
STSTVYMELSSLRSEDTAVYYCAREPPPTMTTVVTILDYWGQG

SEQ ID NO: 5866 - DNA, 129 bp, Artificial Sequence
  Description of Artificial Sequence: Synthetic antibody
gacacgagcacagtctacatggagctgagcagcctgagatctgaggacacggccgtgtattactgtgcgagggaacccccccccaccatgactacggtggtaacgattctggactactggggccaggga

SEQ ID NO: 5867 - protein, 43 aa, Artificial Sequence
  Description of Artificial Sequence: Synthetic antibody
DTSTVYMELSSLRSEDTAVYYCAREPPPTMTTVVTILDYWGQG

SEQ ID NO: 5868 - protein, 20 aa, Artificial Sequence
  Description of Artificial Sequence: Synthetic antibody
CAKDLPYCGGDCYPDAFDIW

SEQ ID NO: 5869 - DNA, 129 bp, Artificial Sequence
  Description of Artificial Sequence: Synthetic antibody
aagaacgcgctgtttctgcaaatgaacagcctgagagccgaggacacggctgtgtattactgtgcgaaagaccttccatattgtggtggtgactgctaccctgatgcttttgatatctggggccaaggg

SEQ ID NO: 5870 - protein, 43 aa, Artificial Sequence
  Description of Artificial Sequence: Synthetic antibody
KNALFLQMNSLRAEDTAVYYCAKDLPYCGGDCYPDAFDIWGQG

SEQ ID NO: 5871 - DNA, 129 bp, Artificial Sequence
  Description of Artificial Sequence: Synthetic antibody
aagaacacgctgtttctgcaaatgaacagcctgagagccgaggacacggctgtgtattactgtgcgaaagaccttccatattgtggtggtgactgctaccctgatgcttttgatatctggggccaaggg

SEQ ID NO: 5872 - protein, 43 aa, Artificial Sequence
  Description of Artificial Sequence: Synthetic antibody
KNTLFLQMNSLRAEDTAVYYCAKDLPYCGGDCYPDAFDIWGQG

SEQ ID NO: 5873 - protein, 19 aa, Artificial Sequence
  Description of Artificial Sequence: Synthetic antibody
CAHSALYYGSGPRGWFDPW

SEQ ID NO: 5874 - DNA, 129 bp, Artificial Sequence
  Description of Artificial Sequence: Synthetic antibody
tccaaaaaccgggtggtccttacaatgaccaacatggaccctgtggacacagccacatattactgtgcacacagcgctctttactatggttcagggccccggggatggttcgacccctggggccaggga

SEQ ID NO: 5875 - protein, 43 aa, Artificial Sequence
  Description of Artificial Sequence: Synthetic antibody
SKNRVVLTMTNMDPVDTATYYCAHSALYYGSGPRGWFDPWGQG

SEQ ID NO: 5876 - DNA, 129 bp, Artificial Sequence
  Description of Artificial Sequence: Synthetic antibody
tccaaaaaccaggtggtccttacaatgaccaacatggaccctgtggacacagccacatattactgtgcacacagcgctctttactatggttcagggccccggggatggttcgacccctggggccaggga

SEQ ID NO: 5877 - protein, 43 aa, Artificial Sequence
  Description of Artificial Sequence: Synthetic antibody
SKNQVVLTMTNMDPVDTATYYCAHSALYYGSGPRGWFDPWGQG

SEQ ID NO: 5878 - protein, 19 aa, Artificial Sequence
  Description of Artificial Sequence: Synthetic antibody
CASWGPLWSGSPNDAFDIW

SEQ ID NO: 5879 - DNA, 129 bp, Artificial Sequence
  Description of Artificial Sequence: Synthetic antibody
gccaagaactcgatgtatctgcaaatgaacagtctgagagccgaggacacggctgtgtattactgtgcaagctgggggcccctttggagtggttccccaaatgatgcttttgatatctggggccaaggg

SEQ ID NO: 5880 - protein, 43 aa, Artificial Sequence
  Description of Artificial Sequence: Synthetic antibody
AKNSMYLQMNSLRAEDTAVYYCASWGPLWSGSPNDAFDIWGQG

SEQ ID NO: 5881 - DNA, 129 bp, Artificial Sequence
  Description of Artificial Sequence: Synthetic antibody
gccaagaacacgctgtatctgcaaatgaacagtctgagagccgaggacacggctgtgtattactgtgcaagctgggggcccctttggagtggttccccaaatgatgcttttgatatctggggccaaggg

SEQ ID NO: 5882 - protein, 43 aa, Artificial Sequence
  Description of Artificial Sequence: Synthetic antibody
AKNTLYLQMNSLRAEDTAVYYCASWGPLWSGSPNDAFDIWGQG

SEQ ID NO: 5883 - protein, 18 aa, Artificial Sequence
  Description of Artificial Sequence: Synthetic antibody
CAKPPGGYSSSWYYLDYW

SEQ ID NO: 5884 - DNA, 129 bp, Artificial Sequence
  Description of Artificial Sequence: Synthetic antibody
aactccatgaacaccctgtacctgcaaatgaacagcctgagagccgaggacacggccgtatattactgtgcgaaaccgccgggggggtatagcagcagctggtactaccttgactattggggccaggga

SEQ ID NO: 5885 - protein, 43 aa, Artificial Sequence
  Description of Artificial Sequence: Synthetic antibody
NSMNTLYLQMNSLRAEDTAVYYCAKPPGGYSSSWYYLDYWGQG

SEQ ID NO: 5886 - DNA, 129 bp, Artificial Sequence
  Description of Artificial Sequence: Synthetic antibody
aactccatcaacaccctgtacctgcaaatgaacagcctgagagccgaggacacggccgtatattactgtgcgaaaccgccgggggggtatagcagcagctggtactaccttgactattggggccaggga

SEQ ID NO: 5887 - protein, 43 aa, Artificial Sequence
  Description of Artificial Sequence: Synthetic antibody
NSINTLYLQMNSLRAEDTAVYYCAKPPGGYSSSWYYLDYWGQG

SEQ ID NO: 5888 - protein, 14 aa, Artificial Sequence
  Description of Artificial Sequence: Synthetic antibody
CARGLGGSPGLDYW

SEQ ID NO: 5889 - DNA, 129 bp, Artificial Sequence
  Description of Artificial Sequence: Synthetic antibody
ttgaccagggacacgtccacgagcacagtctacatggagctgagcagcctgagatctgaggacacggccgtgtattactgtgcgagggggctcggggggagccccgggcttgactactggggccaggga

SEQ ID NO: 5890 - protein, 43 aa, Artificial Sequence
  Description of Artificial Sequence: Synthetic antibody
LTRDTSTSTVYMELSSLRSEDTAVYYCARGLGGSPGLDYWGQG

SEQ ID NO: 5891 - DNA, 129 bp, Artificial Sequence
  Description of Artificial Sequence: Synthetic antibody
atgaccagggacacgtccacgagcacagtctacatggagctgagcagcctgagatctgaggacacggccgtgtattactgtgcgagggggctcggggggagccccgggcttgactactggggccaggga

SEQ ID NO: 5892 - protein, 43 aa, Artificial Sequence
  Description of Artificial Sequence: Synthetic antibody
MTRDTSTSTVYMELSSLRSEDTAVYYCARGLGGSPGLDYWGQG

SEQ ID NO: 5893 - protein, 11 aa, Artificial Sequence
  Description of Artificial Sequence: Synthetic antibody
CAKAVVQGVYW

SEQ ID NO: 5894 - DNA, 129 bp, Artificial Sequence
  Description of Artificial Sequence: Synthetic antibody
cggttcaccatctccagagacaattccaagaacacgctgtatctgcaaatgaacagcctgagagccgaggacacggccgtatattactgtgcgaaggcggtggtacaaggagtatactggggccaggga

SEQ ID NO: 5895 - protein, 43 aa, Artificial Sequence
  Description of Artificial Sequence: Synthetic antibody
RFTISRDNSKNTLYLQMNSLRAEDTAVYYCAKAVVQGVYWGQG

SEQ ID NO: 5896 - DNA, 129 bp, Artificial Sequence
  Description of Artificial Sequence: Synthetic antibody
cggttcaccatctccagacacaattccaagaacacgctgtatctgcaaatcaacagcctgagagccgaggacacggccgtatattactgtgcgaaggcggtggtacaaggagtatactggggccaggga

SEQ ID NO: 5897 - protein, 43 aa, Artificial Sequence
  Description of Artificial Sequence: Synthetic antibody
RFTISRHNSKNTLYLQINSLRAEDTAVYYCAKAVVQGVYWGQG

SEQ ID NO: 5898 - protein, 21 aa, Artificial Sequence
  Description of Artificial Sequence: Synthetic antibody
CAREQSLRNPNYYYFYAMDVW

SEQ ID NO: 5899 - DNA, 129 bp, Artificial Sequence
  Description of Artificial Sequence: Synthetic antibody
tgcacagcctacttggagctgagcagcctgagatctgaagacacggctgtgtattactgtgcgagagagcaaagtctaaggaacccaaattactactacttctacgctatggacgtctggggccaaggg

SEQ ID NO: 5900 - protein, 43 aa, Artificial Sequence
  Description of Artificial Sequence: Synthetic antibody
CTAYLELSSLRSEDTAVYYCAREQSLRNPNYYYFYAMDVWGQG

SEQ ID NO: 5901 - DNA, 129 bp, Artificial Sequence
  Description of Artificial Sequence: Synthetic antibody
agcacagcctacatggagctgagcagcctgagatctgaagacacggctgtgtattactgtgcgagagagcaaagtctaaggaacccaaattactactacttctacgctatggacgtctggggccaaggg

SEQ ID NO: 5902 - protein, 43 aa, Artificial Sequence
  Description of Artificial Sequence: Synthetic antibody
STAYMELSSLRSEDTAVYYCAREQSLRNPNYYYFYAMDVWGQG

SEQ ID NO: 5903 - protein, 18 aa, Artificial Sequence
  Description of Artificial Sequence: Synthetic antibody
CARVRQGLRRTWYYFDYW

SEQ ID NO: 5904 - DNA, 129 bp, Artificial Sequence
  Description of Artificial Sequence: Synthetic antibody
aattccaagaacacgctgtatctgcaaatgaacagtctgagagccgaggacacggctgtgtattactgtgcaagagtgaggcaaggactacggaggacgtggtactactttgactactggggccaggga

SEQ ID NO: 5905 - protein, 43 aa, Artificial Sequence
  Description of Artificial Sequence: Synthetic antibody
NSKNTLYLQMNSLRAEDTAVYYCARVRQGLRRTWYYFDYWGQG

SEQ ID NO: 5906 - DNA, 129 bp, Artificial Sequence
  Description of Artificial Sequence: Synthetic antibody
aacgccaagaacacgctgtatctgcaaatgaacagtctgagagccgaggacacggctgtgtattactgtgcaagagtgaggcaaggactacggaggacgtggtactactttgactactggggccaggga

SEQ ID NO: 5907 - protein, 43 aa, Artificial Sequence
  Description of Artificial Sequence: Synthetic antibody
NAKNTLYLQMNSLRAEDTAVYYCARVRQGLRRTWYYFDYWGQG

SEQ ID NO: 5908 - protein, 18 aa, Artificial Sequence
  Description of Artificial Sequence: Synthetic antibody
CAHGRGSYYYDSNYFDYW

SEQ ID NO: 5909 - DNA, 129 bp, Artificial Sequence
  Description of Artificial Sequence: Synthetic antibody
acctccaaaaaccaggtggtccttacaatgaccaacatggaccctgtggacacagccacatattactgtgcacacgggcggggatcatattactatgatagtaactactttgactactggggccaggga

SEQ ID NO: 5910 - protein, 43 aa, Artificial Sequence
  Description of Artificial Sequence: Synthetic antibody
TSKNQVVLTMTNMDPVDTATYYCAHGRGSYYYDSNYFDYWGQG

SEQ ID NO: 5911 - DNA, 129 bp, Artificial Sequence
  Description of Artificial Sequence: Synthetic antibody
cacctccaaaaccaggtggtccttacaatgaccaacatggaccctgtggacacagccacatattactgtgcacacgggcggggatcatattactatgatagtaactactttgactactggggccaggga

SEQ ID NO: 5912 - protein, 43 aa, Artificial Sequence
  Description of Artificial Sequence: Synthetic antibody
HLQNQVVLTMTNMDPVDTATYYCAHGRGSYYYDSNYFDYWGQG

SEQ ID NO: 5913 - protein, 18 aa, Artificial Sequence
  Description of Artificial Sequence: Synthetic antibody
CAHRSSGYSYGSDYFDYW

SEQ ID NO: 5914 - DNA, 129 bp, Artificial Sequence
  Description of Artificial Sequence: Synthetic antibody
acctccaaaaaccaggtggtccttacaatgaccaacatggaccctgtggacacagccacatattactgtgcacacaggagcagtggatacagctatggttcagactactttgactactggggccaggga

SEQ ID NO: 5915 - protein, 43 aa, Artificial Sequence
  Description of Artificial Sequence: Synthetic antibody
TSKNQVVLTMTNMDPVDTATYYCAHRSSGYSYGSDYFDYWGQG

SEQ ID NO: 5916 - DNA, 129 bp, Artificial Sequence
  Description of Artificial Sequence: Synthetic antibody
cacctccaaaaccaggtggtccttacaatgaccaacatggaccctgtggacacagccacatattactgtgcacacaggagcagtggatacagctatggttcagactactttgactactggggccaggga

SEQ ID NO: 5917 - protein, 43 aa, Artificial Sequence
  Description of Artificial Sequence: Synthetic antibody
HLQNQVVLTMTNMDPVDTATYYCAHRSSGYSYGSDYFDYWGQG

SEQ ID NO: 5918 - protein, 22 aa, Artificial Sequence
  Description of Artificial Sequence: Synthetic antibody
CAKDMRYCSSPGCYGDWYFDLW

SEQ ID NO: 5919 - DNA, 129 bp, Artificial Sequence
  Description of Artificial Sequence: Synthetic antibody
tcgatgtatctgcaaatgaacagcctgagagccgaggacacggccgtatattactgtgcgaaagatatgagatattgtagtagtcccggctgctatggcgactggtacttcgatctctggggccgtggc

SEQ ID NO: 5920 - protein, 43 aa, Artificial Sequence
  Description of Artificial Sequence: Synthetic antibody
SMYLQMNSLRAEDTAVYYCAKDMRYCSSPGCYGDWYFDLWGRG

SEQ ID NO: 5921 - DNA, 129 bp, Artificial Sequence
  Description of Artificial Sequence: Synthetic antibody
acgctgtatctgcaaatgaacagcctgagagccgaggacacggccgtatattactgtgcgaaagatatgagatattgtagtagtcccggctgctatggcgactggtacttcgatctctggggccgtggc

SEQ ID NO: 5922 - protein, 43 aa, Artificial Sequence
  Description of Artificial Sequence: Synthetic antibody
TLYLQMNSLRAEDTAVYYCAKDMRYCSSPGCYGDWYFDLWGRG

SEQ ID NO: 5923 - protein, 17 aa, Artificial Sequence
  Description of Artificial Sequence: Synthetic antibody
CARDLRIPAGTEGFDYW

SEQ ID NO: 5924 - DNA, 129 bp, Artificial Sequence
  Description of Artificial Sequence: Synthetic antibody
gacaattccaaggacacactgtatcttcaaatgaacagcctgagagccgaggacatggccgtgtatttctgtgcgagagatctccgtataccagctggtaccgagggctttgactactggggccaggga

SEQ ID NO: 5925 - protein, 43 aa, Artificial Sequence
  Description of Artificial Sequence: Synthetic antibody
DNSKDTLYLQMNSLRAEDMAVYFCARDLRIPAGTEGFDYWGQG

SEQ ID NO: 5926 - DNA, 129 bp, Artificial Sequence
  Description of Artificial Sequence: Synthetic antibody
gacaattccaagaacacactgtatcttcaaatgaacagcctgagagccgaggacacggccgtgtatttctgtgcgagagatctccgtataccagctggtaccgagggctttgactactggggccaggga

SEQ ID NO: 5927 - protein, 43 aa, Artificial Sequence
  Description of Artificial Sequence: Synthetic antibody
DNSKNTLYLQMNSLRAEDTAVYFCARDLRIPAGTEGFDYWGQG

SEQ ID NO: 5928 - protein, 16 aa, Artificial Sequence
  Description of Artificial Sequence: Synthetic antibody
CSRRMGSYSGHYLGYW

SEQ ID NO: 5929 - DNA, 129 bp, Artificial Sequence
  Description of Artificial Sequence: Synthetic antibody
agtaacacatccataagtacagcctacatggaattgagcggcctgaaatctgacgacacggccgtctactattgttcgaggaggatgggctcttatagtggacactacttaggctactggggccaggga

SEQ ID NO: 5930 - protein, 43 aa, Artificial Sequence
  Description of Artificial Sequence: Synthetic antibody
SNTSISTAYMELSGLKSDDTAVYYCSRRMGSYSGHYLGYWGQG

SEQ ID NO: 5931 - DNA, 129 bp, Artificial Sequence
  Description of Artificial Sequence: Synthetic antibody
aggaacacatccataagtacagcctacatggaattgagcggcctgaaatctgacgacacggccgtctactattgttcgaggaggatgggctcttatagtggacactacttaggctactggggccaggga

SEQ ID NO: 5932 - protein, 43 aa, Artificial Sequence
  Description of Artificial Sequence: Synthetic antibody
RNTSISTAYMELSGLKSDDTAVYYCSRRMGSYSGHYLGYWGQG

SEQ ID NO: 5933 - protein, 16 aa, Artificial Sequence
  Description of Artificial Sequence: Synthetic antibody
CARVGETAAAGMVDYW

SEQ ID NO: 5934 - DNA, 129 bp, Artificial Sequence
  Description of Artificial Sequence: Synthetic antibody
tgggacaacgccaagaactcactgtatctgcaaatgaacagcctgagagccgaggacacggccgtatattactgtgcgagagtgggggaaacagcagcagctggaatggtggactactggggccaggga

SEQ ID NO: 5935 - protein, 43 aa, Artificial Sequence
  Description of Artificial Sequence: Synthetic antibody
WDNAKNSLYLQMNSLRAEDTAVYYCARVGETAAAGMVDYWGQG

SEQ ID NO: 5936 - DNA, 129 bp, Artificial Sequence
  Description of Artificial Sequence: Synthetic antibody
agggacaacgccaagaactcactgtatctgcaaatgaacagcctgagagccgaggacacggccgtatattactgtgcgagagtgggggaaacagcagcagctggaatggtggactactggggccaggga

SEQ ID NO: 5937 - protein, 43 aa, Artificial Sequence
  Description of Artificial Sequence: Synthetic antibody
RDNAKNSLYLQMNSLRAEDTAVYYCARVGETAAAGMVDYWGQG

SEQ ID NO: 5938 - protein, 14 aa, Artificial Sequence
  Description of Artificial Sequence: Synthetic antibody
CAKVFSNSHFFDYW

SEQ ID NO: 5939 - DNA, 129 bp, Artificial Sequence
  Description of Artificial Sequence: Synthetic antibody
atctccatacacaattccaagagcacgctgtatctgcaaatgaacagcctgagacccgaggacacggccgtatattactgtgcgaaagtgtttagcaacagccacttctttgactactggggccaggga

SEQ ID NO: 5940 - protein, 43 aa, Artificial Sequence
  Description of Artificial Sequence: Synthetic antibody
ISIHNSKSTLYLQMNSLRPEDTAVYYCAKVFSNSHFFDYWGQG

SEQ ID NO: 5941 - DNA, 129 bp, Artificial Sequence
  Description of Artificial Sequence: Synthetic antibody
atctccagagacaattccaagagcacgctgtatctgcaaatgaacagcctgagacccgaggacacggccgtatattactgtgcgaaagtgtttagcaacagccacttctttgactactggggccaggga

SEQ ID NO: 5942 - protein, 43 aa, Artificial Sequence
  Description of Artificial Sequence: Synthetic antibody
ISRDNSKSTLYLQMNSLRPEDTAVYYCAKVFSNSHFFDYWGQG

SEQ ID NO: 5943 - protein, 22 aa, Artificial Sequence
  Description of Artificial Sequence: Synthetic antibody
CARDLRYCGGDCYSLAGAFDIW

SEQ ID NO: 5944 - DNA, 129 bp, Artificial Sequence
  Description of Artificial Sequence: Synthetic antibody
acagtctacttggagctgagcagcctgagatctgaggacacggccgtgtattactgtgcgagagatttacgatattgtggtggtgactgctattctttggctggtgcttttgatatctggggccaaggg

SEQ ID NO: 5945 - protein, 43 aa, Artificial Sequence
  Description of Artificial Sequence: Synthetic antibody
TVYLELSSLRSEDTAVYYCARDLRYCGGDCYSLAGAFDIWGQG

SEQ ID NO: 5946 - DNA, 129 bp, Artificial Sequence
  Description of Artificial Sequence: Synthetic antibody
acagtctacatggagctgagcagcctgagatctgaggacacggccgtgtattactgtgcgagagatttacgatattgtggtggtgactgctattctttggctggtgcttttgatatctggggccaaggg

SEQ ID NO: 5947 - protein, 43 aa, Artificial Sequence
  Description of Artificial Sequence: Synthetic antibody
TVYMELSSLRSEDTAVYYCARDLRYCGGDCYSLAGAFDIWGQG

SEQ ID NO: 5948 - protein, 11 aa, Artificial Sequence
  Description of Artificial Sequence: Synthetic antibody
CARESNARLDW

SEQ ID NO: 5949 - DNA, 129 bp, Artificial Sequence
  Description of Artificial Sequence: Synthetic antibody
ctattcaccatctccagatacaatgccaagaactcactgtatctgcaaatgaacagcctgagagacgaggacacggctgtgtattactgtgcgagagaatccaacgctcggctggactggggccaggga

SEQ ID NO: 5950 - protein, 43 aa, Artificial Sequence
  Description of Artificial Sequence: Synthetic antibody
LFTISRYNAKNSLYLQMNSLRDEDTAVYYCARESNARLDWGQG

SEQ ID NO: 5951 - DNA, 129 bp, Artificial Sequence
  Description of Artificial Sequence: Synthetic antibody
cgattcaccatctccagagacaatgccaagaactcactgtatctgcaaatgaacagcctgagagacgaggacacggctgtgtattactgtgcgagagaatccaacgctcggctggactggggccaggga

SEQ ID NO: 5952 - protein, 43 aa, Artificial Sequence
  Description of Artificial Sequence: Synthetic antibody
RFTISRDNAKNSLYLQMNSLRDEDTAVYYCARESNARLDWGQG

SEQ ID NO: 5953 - protein, 21 aa, Artificial Sequence
  Description of Artificial Sequence: Synthetic antibody
CARESYCTGGVCYPNYGMDVW

SEQ ID NO: 5954 - DNA, 129 bp, Artificial Sequence
  Description of Artificial Sequence: Synthetic antibody
aacacgctgtatcttcaaatgaacagcctgagagccgaggacacggccgtgtattactgtgcgagagaaagctattgtactggtggtgtatgctaccccaactacggtatggacgtctggggccaaggg

SEQ ID NO: 5955 - protein, 43 aa, Artificial Sequence
  Description of Artificial Sequence: Synthetic antibody
NTLYLQMNSLRAEDTAVYYCARESYCTGGVCYPNYGMDVWGQG

SEQ ID NO: 5956 - DNA, 129 bp, Artificial Sequence
  Description of Artificial Sequence: Synthetic antibody
aacacgatgtatcttcaaatgaacagcctgagagccgagtacacggccgtgtattactgtgcgagagaaagctattgtactggtggtgtatgctaccccaactacggtatggacgtctggggccaaggg

SEQ ID NO: 5957 - protein, 43 aa, Artificial Sequence
  Description of Artificial Sequence: Synthetic antibody
NTMYLQMNSLRAEYTAVYYCARESYCTGGVCYPNYGMDVWGQG

SEQ ID NO: 5958 - protein, 16 aa, Artificial Sequence
  Description of Artificial Sequence: Synthetic antibody
CARVLYSYGPGPIDYW

SEQ ID NO: 5959 - DNA, 129 bp, Artificial Sequence
  Description of Artificial Sequence: Synthetic antibody
agagacaatgccaagaactcagtgtatctgcaaatgaacagcctgagagacgaggacacggctgtgtattactgtgcgagagttctgtacagctatggtccgggacctattgactactggggccaggga

SEQ ID NO: 5960 - protein, 43 aa, Artificial Sequence
  Description of Artificial Sequence: Synthetic antibody
RDNAKNSVYLQMNSLRDEDTAVYYCARVLYSYGPGPIDYWGQG

SEQ ID NO: 5961 - DNA, 129 bp, Artificial Sequence
  Description of Artificial Sequence: Synthetic antibody
agagacaatgccaagaactcagtgtatctgcaaatgaacagcctgagagacgaggacacggctgtgtattactgtgcaagagttctgtacagctatggtccaggacctattgactactggggccaggga

SEQ ID NO: 5962 - protein, 23 aa, Artificial Sequence
  Description of Artificial Sequence: Synthetic antibody
CARGRYTSEWFGEFRGRNWFDPW

SEQ ID NO: 5963 - DNA, 129 bp, Artificial Sequence
  Description of Artificial Sequence: Synthetic antibody
gcctacttggagctgaggagcctgagatctgacgacacggccgtgtattactgtgcgagaggacggtacacttcggaatggttcggggagttccgcggacgcaactggttcgacccctggggccaggga

SEQ ID NO: 5964 - protein, 43 aa, Artificial Sequence
  Description of Artificial Sequence: Synthetic antibody
AYLELRSLRSDDTAVYYCARGRYTSEWFGEFRGRNWFDPWGQG

SEQ ID NO: 5965 - DNA, 129 bp, Artificial Sequence
  Description of Artificial Sequence: Synthetic antibody
gcctacatggagctgaggagcctgagatctgacgacacggccgtgtattactgtgcgagaggacggtacacttcggaatggttcggggagttccgcggacgcaactggttcgacccctggggccaggga

SEQ ID NO: 5966 - protein, 43 aa, Artificial Sequence
  Description of Artificial Sequence: Synthetic antibody
AYMELRSLRSDDTAVYYCARGRYTSEWFGEFRGRNWFDPWGQG

SEQ ID NO: 5967 - protein, 21 aa, Artificial Sequence
  Description of Artificial Sequence: Synthetic antibody
CAHAFKGDFVWSTIFHAFDIW

SEQ ID NO: 5968 - DNA, 129 bp, Artificial Sequence
  Description of Artificial Sequence: Synthetic antibody
aatcaggtggtccttacaatgaccaatttggaccctgtggacacagccacatattactgtgcacacgcttttaagggcgattttgtctggtcaaccatctttcatgcttttgatatctggggccaaggg

SEQ ID NO: 5969 - protein, 43 aa, Artificial Sequence
  Description of Artificial Sequence: Synthetic antibody
NQVVLTMTNLDPVDTATYYCAHAFKGDFVWSTIFHAFDIWGQG

SEQ ID NO: 5970 - DNA, 129 bp, Artificial Sequence
  Description of Artificial Sequence: Synthetic antibody
aaccaggtggtccttacaatgaccaatttggaccctgtggacacagccacatattactgtgcacacgcttttaagggcgattttgtctggtcaaccatctttcatgcttttgatatctggggccaaggg

SEQ ID NO: 5971 - protein, 22 aa, Artificial Sequence
  Description of Artificial Sequence: Synthetic antibody
CARWSHDYGDYTIYYYYGMDVW

SEQ ID NO: 5972 - DNA, 129 bp, Artificial Sequence
  Description of Artificial Sequence: Synthetic antibody
actgcctacttggagctgaggagcctgagatctgacgacacggccgtgtattactgtgcgagatggagccatgactacggtgactacaccatctactactactacggtatggacgtctggggccaaggg

SEQ ID NO: 5973 - protein, 43 aa, Artificial Sequence
  Description of Artificial Sequence: Synthetic antibody
TAYLELRSLRSDDTAVYYCARWSHDYGDYTIYYYYGMDVWGQG

SEQ ID NO: 5974 - DNA, 129 bp, Artificial Sequence
  Description of Artificial Sequence: Synthetic antibody
acagcctacatggagctgaggagcctgagatctgacgacacggccgtgtattactgtgcgagatggagccatgactacggtgactacaccatctactactactacggtatggacgtctggggccaaggg

SEQ ID NO: 5975 - protein, 43 aa, Artificial Sequence
  Description of Artificial Sequence: Synthetic antibody
TAYMELRSLRSDDTAVYYCARWSHDYGDYTIYYYYGMDVWGQG

SEQ ID NO: 5976 - protein, 15 aa, Artificial Sequence
  Description of Artificial Sequence: Synthetic antibody
CARVGGYSYGYPHYW

SEQ ID NO: 5977 - DNA, 129 bp, Artificial Sequence
  Description of Artificial Sequence: Synthetic antibody
tccagagacaacgccaagaactccctgtatctgcaaatgaacagtctgagagccgaggacacggccttgtattactgtgcgagagttggagggtacagctatggttatccccactactggggccaggga

SEQ ID NO: 5978 - protein, 43 aa, Artificial Sequence
  Description of Artificial Sequence: Synthetic antibody
SRDNAKNSLYLQMNSLRAEDTALYYCARVGGYSYGYPHYWGQG

SEQ ID NO: 5979 - DNA, 129 bp, Artificial Sequence
  Description of Artificial Sequence: Synthetic antibody
tccagagacaacgccaagaactccctgtatctgcaaatgaacagtctgagagccgaggacacggccttgtattactgtgcgagagttggaggatacagctatggttatccccactactggggccaggga

SEQ ID NO: 5980 - protein, 15 aa, Artificial Sequence
  Description of Artificial Sequence: Synthetic antibody
CARAYGDYILYFDYW

SEQ ID NO: 5981 - DNA, 129 bp, Artificial Sequence
  Description of Artificial Sequence: Synthetic antibody
tcaagagatgattccaaaagcatcgcctatctgcaaatgagcagcctgaaaaccgaggacacagccgtctattactgtgctagagcgtacggtgactacatattatactttgactactggggccaggga

SEQ ID NO: 5982 - protein, 43 aa, Artificial Sequence
  Description of Artificial Sequence: Synthetic antibody
SRDDSKSIAYLQMSSLKTEDTAVYYCARAYGDYILYFDYWGQG

SEQ ID NO: 5983 - DNA, 129 bp, Artificial Sequence
  Description of Artificial Sequence: Synthetic antibody
tcaagagatgattccaaaagcatcgcctatctgcaaatgaacagcctgaaaaccgaggacacagccgtctattactgtgctagagcgtacggtgactacatattatactttgactactggggccaggga

SEQ ID NO: 5984 - protein, 43 aa, Artificial Sequence
  Description of Artificial Sequence: Synthetic antibody
SRDDSKSIAYLQMNSLKTEDTAVYYCARAYGDYILYFDYWGQG

SEQ ID NO: 5985 - protein, 17 aa, Artificial Sequence
  Description of Artificial Sequence: Synthetic antibody
CARENGHGGNIASFDYW

SEQ ID NO: 5986 - DNA, 129 bp, Artificial Sequence
  Description of Artificial Sequence: Synthetic antibody
gacacatccgcgagcacagcctacatggagctgagcagcctgagatctgaagacgcggctgtatattactgtgcgagagaaaacggccacggtggtaacatcgcatcctttgactactggggccaggga

SEQ ID NO: 5987 - protein, 43 aa, Artificial Sequence
  Description of Artificial Sequence: Synthetic antibody
DTSASTAYMELSSLRSEDAAVYYCARENGHGGNIASFDYWGQG

SEQ ID NO: 5988 - DNA, 129 bp, Artificial Sequence
  Description of Artificial Sequence: Synthetic antibody
gacacatccgcgagcacagcctacatggagctgagcagcctgagatctgaagacacggctgtatattactgtgcgagagaaaacggccacggtggtaacatcgcatcctttgactactggggccaggga

SEQ ID NO: 5989 - protein, 43 aa, Artificial Sequence
  Description of Artificial Sequence: Synthetic antibody
DTSASTAYMELSSLRSEDTAVYYCARENGHGGNIASFDYWGQG

SEQ ID NO: 5990 - protein, 17 aa, Artificial Sequence
  Description of Artificial Sequence: Synthetic antibody
CARDGEYSSSFYGMDVW

SEQ ID NO: 5991 - DNA, 129 bp, Artificial Sequence
  Description of Artificial Sequence: Synthetic antibody
tacaattccaagaacacgctgtatcttcaaatgaacagcctgagagccgaggacacggccgtgtattactgtgcgagagatggggaatatagcagcagcttctacggtatggacgtctggggccaaggg

SEQ ID NO: 5992 - protein, 43 aa, Artificial Sequence
  Description of Artificial Sequence: Synthetic antibody
YNSKNTLYLQMNSLRAEDTAVYYCARDGEYSSSFYGMDVWGQG

SEQ ID NO: 5993 - DNA, 129 bp, Artificial Sequence
  Description of Artificial Sequence: Synthetic antibody
gacaattccaagaacacgctgtatcttcaaatgaacagcctgagagccgaggacacggccgtgtattactgtgcgagagatggggaatatagcagcagcttctacggtatggacgtctggggccaaggg

SEQ ID NO: 5994 - protein, 43 aa, Artificial Sequence
  Description of Artificial Sequence: Synthetic antibody
DNSKNTLYLQMNSLRAEDTAVYYCARDGEYSSSFYGMDVWGQG

SEQ ID NO: 5995 - protein, 16 aa, Artificial Sequence
  Description of Artificial Sequence: Synthetic antibody
CARTDILTGYYQFDYW

SEQ ID NO: 5996 - DNA, 129 bp, Artificial Sequence
  Description of Artificial Sequence: Synthetic antibody
caaggactcctccaaaaaccaggtggtcctacaatgaccaacatggaccctgtggacacagacacatattactgtgcacgcaccgatattttgactggttattatcaatttgactactggggccacgga

SEQ ID NO: 5997 - protein, 43 aa, Artificial Sequence
  Description of Artificial Sequence: Synthetic antibody
QGLLQKPGGPTMTNMDPVDTDTYYCARTDILTGYYQFDYWGHG

SEQ ID NO: 5998 - DNA, 129 bp, Artificial Sequence
  Description of Artificial Sequence: Synthetic antibody
aaggactcctccaaaaaccaggtggtccttacaatgaccaacatggaccctgtggacacagacacatattactgtgcacgcaccgatattttgactggttattatcaatttgactactggggccacgga

SEQ ID NO: 5999 - protein, 43 aa, Artificial Sequence
  Description of Artificial Sequence: Synthetic antibody
KDSSKNQVVLTMTNMDPVDTDTYYCARTDILTGYYQFDYWGHG

SEQ ID NO: 6000 - protein, 16 aa, Artificial Sequence
  Description of Artificial Sequence: Synthetic antibody
CAKDPSAAGTHYFQHW

SEQ ID NO: 6001 - DNA, 129 bp, Artificial Sequence
  Description of Artificial Sequence: Synthetic antibody
agagacaacgccaagaactccctgtgtctgcaaatgaacagtctgagagctgaggacacggccttgtattactgtgcaaaagatccgtcagcagctggtacccattacttccagcactgggaccagggc

SEQ ID NO: 6002 - protein, 43 aa, Artificial Sequence
  Description of Artificial Sequence: Synthetic antibody
RDNAKNSLCLQMNSLRAEDTALYYCAKDPSAAGTHYFQHWDQG

SEQ ID NO: 6003 - DNA, 129 bp, Artificial Sequence
  Description of Artificial Sequence: Synthetic antibody
agagacaacgccaagaactccctgtatctgcaaatgaacagtctgagagctgaggacacggccttgtattactgtgcaaaagatccgtcagcagctggtacccattacttccagcactggggccagggc

SEQ ID NO: 6004 - protein, 43 aa, Artificial Sequence
  Description of Artificial Sequence: Synthetic antibody
RDNAKNSLYLQMNSLRAEDTALYYCAKDPSAAGTHYFQHWGQG

SEQ ID NO: 6005 - protein, 10 aa, Artificial Sequence [sequence omitted]

SEQ ID NO: 6006 - DNA, 129 bp, Artificial Sequence
  Description of Artificial Sequence: Synthetic antibody
ggccgattcatcatctccagatataattccaagaacatgacgtttctgcaaatggacaggttgagaggcgacgacacggccgtatattactgtgcgaaagggggctggcttgacgactggggccaggga

SEQ ID NO: 6007 - protein, 43 aa, Artificial Sequence
  Description of Artificial Sequence: Synthetic antibody
GRFIISRYNSKNMTFLQMDRLRGDDTAVYYCAKGGWLDDWGQG

SEQ ID NO: 6008 - DNA, 129 bp, Artificial Sequence
  Description of Artificial Sequence: Synthetic antibody
ggccgattcatcatctccagagataattccaagaacatgacgtttctgcaaatggacaggttgagaggcgacgacacggccgtatattactgtgcgaaagggggctggcttgacgactggggccaggga

SEQ ID NO: 6009 - protein, 43 aa, Artificial Sequence
  Description of Artificial Sequence: Synthetic antibody
GRFIISRDNSKNMTFLQMDRLRGDDTAVYYCAKGGWLDDWGQG

SEQ ID NO: 6010 - protein, 24 aa, Artificial Sequence
  Description of Artificial Sequence: Synthetic antibody
CARDGPQDYGDNSYYYYYYGMDVW

SEQ ID NO: 6011 - DNA, 129 bp, Artificial Sequence
  Description of Artificial Sequence: Synthetic antibody
tttatgcaaatgaacagcctgagagacgaggacacggctgtgtattactgtgcgagagatggaccccaagactacggtgacaactcctattactactactactacggtatggacgtctggggccaaggg

SEQ ID NO: 6012 - protein, 43 aa, Artificial Sequence
  Description of Artificial Sequence: Synthetic antibody
FMQMNSLRDEDTAVYYCARDGPQDYGDNSYYYYYYGMDVWGQG

SEQ ID NO: 6013 - DNA, 129 bp, Artificial Sequence
  Description of Artificial Sequence: Synthetic antibody
tatctgcaaatgaacagcctgagagacgaggacacggctgtgtattactgtgcgagagatggaccccaagactacggtgacaactcctattactactactactacggtatggacgtctggggccaaggg

SEQ ID NO: 6014 - protein, 43 aa, Artificial Sequence
  Description of Artificial Sequence: Synthetic antibody
YLQMNSLRDEDTAVYYCARDGPQDYGDNSYYYYYYGMDVWGQG

SEQ ID NO: 6015 - protein, 13 aa, Artificial Sequence
  Description of Artificial Sequence: Synthetic antibody
CARDLEPWYFDVW

SEQ ID NO: 6016 - DNA, 129 bp, Artificial Sequence
  Description of Artificial Sequence: Synthetic antibody
accatctccagagacaatgccaagaatttattgtatctgcaaatgaccaggctgagagacgacgacacggctgtgtattactgtgcgcgagatctcgagccctggtacttcgatgtctggggccgtggc

SEQ ID NO: 6017 - protein, 43 aa, Artificial Sequence
  Description of Artificial Sequence: Synthetic antibody
TISRDNAKNLLYLQMTRLRDDDTAVYYCARDLEPWYFDVWGRG

SEQ ID NO: 6018 - DNA, 129 bp, Artificial Sequence
  Description of Artificial Sequence: Synthetic antibody
aacatctccatagacaatgccaagaatttattgtatctgcaaatgaccaggctgagagacgacgacacggctgtgtattactgtgcgcgagatctcgagccctggtacttcgatgtctggggccgtggc

SEQ ID NO: 6019 - protein, 43 aa, Artificial Sequence
  Description of Artificial Sequence: Synthetic antibody
NISIDNAKNLLYLQMTRLRDDDTAVYYCARDLEPWYFDVWGRG

SEQ ID NO: 6020 - protein, 20 aa, Artificial Sequence
  Description of Artificial Sequence: Synthetic antibody
CTTDDYGDYRRYYYYGMDVW

SEQ ID NO: 6021 - DNA, 129 bp, Artificial Sequence
  Description of Artificial Sequence: Synthetic antibody
aaaaacacgctgtatctgcaaatgaacagcctgaaaaccgaggacatagccgtgtattactgtaccacagacgactacggtgactaccgaaggtactactactacggtatggacgtctggggccaaggg

SEQ ID NO: 6022 - protein, 43 aa, Artificial Sequence
  Description of Artificial Sequence: Synthetic antibody
KNTLYLQMNSLKTEDIAVYYCTTDDYGDYRRYYYYGMDVWGQG

SEQ ID NO: 6023 - DNA, 129 bp, Artificial Sequence
  Description of Artificial Sequence: Synthetic antibody
aaaaacacgctgtatctgcaaatgaacagcctgaaaaccgaggacacagccgtgtattactgtaccacagacgactacggtgactaccgaaggtactactactacggtatggacgtctggggccaaggg

SEQ ID NO: 6024 - protein, 43 aa, Artificial Sequence
  Description of Artificial Sequence: Synthetic antibody
KNTLYLQMNSLKTEDTAVYYCTTDDYGDYRRYYYYGMDVWGQG

SEQ ID NO: 6025 - protein, 17 aa, Artificial Sequence
  Description of Artificial Sequence: Synthetic antibody
CGRLHYDGLGHDAFDIW

SEQ ID NO: 6026 - DNA, 129 bp, Artificial Sequence
  Description of Artificial Sequence: Synthetic antibody
gacacatcctcgagcacagcctacatggagctgaggagcctgagatctgacgacacggccgtgtattactgtgggcgtctccactatgacggtttgggtcatgatgcttttgatatctggggccaaggg

SEQ ID NO: 6027 - protein, 43 aa, Artificial Sequence
  Description of Artificial Sequence: Synthetic antibody
DTSSSTAYMELRSLRSDDTAVYYCGRLHYDGLGHDAFDIWGQG

SEQ ID NO: 6028 - DNA, 129 bp, Artificial Sequence
  Description of Artificial Sequence: Synthetic antibody
gacacatccacgagcacagcctacatggagctgaggagcctgagatctgacgacacggccgtgtattactgtgggcgtctccactatgacggtttgggtcatgatgcttttgatatctggggccaaggg

SEQ ID NO: 6029 - protein, 43 aa, Artificial Sequence
  Description of Artificial Sequence: Synthetic antibody
DTSTSTAYMELRSLRSDDTAVYYCGRLHYDGLGHDAFDIWGQG

SEQ ID NO: 6030 - protein, 14 aa, Artificial Sequence
  Description of Artificial Sequence: Synthetic antibody
CAKVGVGAGALDYW

SEQ ID NO: 6031 - DNA, 129 bp, Artificial Sequence
  Description of Artificial Sequence: Synthetic antibody
atctccagagataattccaagaacacgctgtatctgcaaatgaacagcctgagagccgaggacacggccgtatattactgtgcgaaagtcggggttggagcgggagcccttgactactggggccaggga

SEQ ID NO: 6032 - protein, 43 aa, Artificial Sequence
  Description of Artificial Sequence: Synthetic antibody
ISRDNSKNTLYLQMNSLRAEDTAVYYCAKVGVGAGALDYWGQG

SEQ ID NO: 6033 - DNA, 129 bp, Artificial Sequence
  Description of Artificial Sequence: Synthetic antibody
atctccacacataattccaagaacacgctgtatctgcaaatgaacagcctgagagccgaggacacggccgtatattactgtgcgaaagtcggggttggagcgggagcccttgactactggggccaggga

SEQ ID NO: 6034 - protein, 43 aa, Artificial Sequence
  Description of Artificial Sequence: Synthetic antibody
ISTHNSKNTLYLQMNSLRAEDTAVYYCAKVGVGAGALDYWGQG

SEQ ID NO: 6035 - protein, 15 aa, Artificial Sequence
  Description of Artificial Sequence: Synthetic antibody
CARARGVGRYYFDYW

SEQ ID NO: 6036 - DNA, 129 bp, Artificial Sequence
  Description of Artificial Sequence: Synthetic antibody
tccagagaaaatgccaagaactccttgtatcttcaaatgaacagcctgagagccggggacacggctgtgtattactgtgcaagagccaggggagtgggacggtactactttgactactggggccaggga

SEQ ID NO: 6037 - protein, 43 aa, Artificial Sequence
  Description of Artificial Sequence: Synthetic antibody
SRENAKNSLYLQMNSLRAGDTAVYYCARARGVGRYYFDYWGQG

SEQ ID NO: 6038 - DNA, 129 bp, Artificial Sequence
  Description of Artificial Sequence: Synthetic antibody
tacagagaaaatgccaagaactccttgtatcttcaaatgaacagcctgagagccggtgacacggctgtgtattactgtgcaagagccaggggagtgggacggtactactttgactactggggccaggga

SEQ ID NO: 6039 - protein, 43 aa, Artificial Sequence
  Description of Artificial Sequence: Synthetic antibody
YRENAKNSLYLQMNSLRAGDTAVYYCARARGVGRYYFDYWGQG

SEQ ID NO: 6040 - protein, 14 aa, Artificial Sequence
  Description of Artificial Sequence: Synthetic antibody
CARFQRSFGYFDYW

SEQ ID NO: 6041 - DNA, 129 bp, Artificial Sequence
  Description of Artificial Sequence: Synthetic antibody
atctcagccgacaggtccatcaccaccgccttcctgcagtgggacagtctgaaggcctcggacaccgccctttatttctgtgcgagattccaacgcagtttcggctattttgactactggggccaggga

SEQ ID NO: 6042 - protein, 43 aa, Artificial Sequence
  Description of Artificial Sequence: Synthetic antibody
ISADRSITTAFLQWDSLKASDTALYFCARFQRSFGYFDYWGQG

SEQ ID NO: 6043 - DNA, 129 bp, Artificial Sequence
  Description of Artificial Sequence: Synthetic antibody
tctcagcccgacaggtccatcaccaccgccttcctgcagtgggacagtctgaaggcctcggacaccgccctttatttctgtgcgagattccaacgcagtttcggctattttgactactggggccaggga

SEQ ID NO: 6044 - protein, 43 aa, Artificial Sequence
  Description of Artificial Sequence: Synthetic antibody
SQPDRSITTAFLQWDSLKASDTALYFCARFQRSFGYFDYWGQG

SEQ ID NO: 6045 - protein, 18 aa, Artificial Sequence
  Description of Artificial Sequence: Synthetic antibody
CARGGIQVPGLDDVFDIW

SEQ ID NO: 6046 - DNA, 129 bp, Artificial Sequence
  Description of Artificial Sequence: Synthetic antibody
gacgccaaaaactccttgtatcttcaaatgaacagcctgagagacggggacacggctgtttattactgtgccaggggaggtatacaagtgcctggcctagatgatgtctttgatatctggggccaaggg

SEQ ID NO: 6047 - protein, 43 aa, Artificial Sequence
  Description of Artificial Sequence: Synthetic antibody
DAKNSLYLQMNSLRDGDTAVYYCARGGIQVPGLDDVFDIWGQG

SEQ ID NO: 6048 - DNA, 129 bp, Artificial Sequence
  Description of Artificial Sequence: Synthetic antibody
agacgccaaaactccttgtatcttcaaatgaacagcctgagagacggggacacggctgtttattactgtgccaggggaggtatacaagtgcctggcctagatgatgtctttgatatctggggccaaggg

SEQ ID NO: 6049 - protein, 43 aa, Artificial Sequence
  Description of Artificial Sequence: Synthetic antibody
RRQNSLYLQMNSLRDGDTAVYYCARGGIQVPGLDDVFDIWGQG

SEQ ID NO: 6050 - protein, 13 aa, Artificial Sequence
  Description of Artificial Sequence: Synthetic antibody
CARGYITGTWDYW

SEQ ID NO: 6051 - DNA, 129 bp, Artificial Sequence
  Description of Artificial Sequence: Synthetic antibody
accatgaccaggaacacctccataagcacagcctacatggagctgagcagcctgagatctgaggacacggccgtgtattactgtgcgagaggatacataactggaacgtgggactactggggccaggga

SEQ ID NO: 6052 - protein, 43 aa, Artificial Sequence
  Description of Artificial Sequence: Synthetic antibody
TMTRNTSISTAYMELSSLRSEDTAVYYCARGYITGTWDYWGQG

SEQ ID NO: 6053 - DNA, 129 bp, Artificial Sequence
  Description of Artificial Sequence: Synthetic antibody
accatgaccagcaacacctccataagcacagcctacatggagctgagcagcctgagatctgaggacacggccgtgtattactgtgcgagaggatacataactggaacgtgggactactggggccaggga

SEQ ID NO: 6054 - protein, 43 aa, Artificial Sequence
  Description of Artificial Sequence: Synthetic antibody
TMTSNTSISTAYMELSSLRSEDTAVYYCARGYITGTWDYWGQG

SEQ ID NO: 6055 - protein, 16 aa, Artificial Sequence
  Description of Artificial Sequence: Synthetic antibody
CAKDRSSYGAGGMDVW

SEQ ID NO: 6056 - DNA, 129 bp, Artificial Sequence
  Description of Artificial Sequence: Synthetic antibody
agagacaattccaagaacacgctgtatctgcaaatgaacagcctgagagccgaggactcggctgtctattactgtgcgaaagatagaagcagttatggagcggggggtatggacgtctggggccaaggg

SEQ ID NO: 6057 - protein, 43 aa, Artificial Sequence
  Description of Artificial Sequence: Synthetic antibody
RDNSKNTLYLQMNSLRAEDSAVYYCAKDRSSYGAGGMDVWGQG

SEQ ID NO: 6058 - DNA, 129 bp, Artificial Sequence
  Description of Artificial Sequence: Synthetic antibody
agagacaattccaagaacacgctgtacctgcaaatgaacagcctgagagccgaggactcggctgtctattactgtgcgaaagatagaagcagttatggagcagggggtatggacgtctggggccaaggg

SEQ ID NO: 6059 - protein, 14 aa, Artificial Sequence
  Description of Artificial Sequence: Synthetic antibody
CARDRTGGYLFDYW

SEQ ID NO: 6060 - DNA, 129 bp, Artificial Sequence
  Description of Artificial Sequence: Synthetic antibody
atcaacccagacacatccaagaaccagttctccctgcagctgaactctgtggctcccgaggacacggctgtgtattactgtgcaagagatcgcactggtggttacttatttgactactggggccaggga

SEQ ID NO: 6061 - protein, 43 aa, Artificial Sequence
  Description of Artificial Sequence: Synthetic antibody
INPDTSKNQFSLQLNSVAPEDTAVYYCARDRTGGYLFDYWGQG

SEQ ID NO: 6062 - DNA, 129 bp, Artificial Sequence
  Description of Artificial Sequence: Synthetic antibody
atcaacccagacacatccaagaaccagttctccctgcagctgaactctgcggctcccgaggacacggctgtgtattactgtgcaagagatcgcactggtggctacttatttgactactggggccaggga

SEQ ID NO: 6063 - protein, 43 aa, Artificial Sequence
  Description of Artificial Sequence: Synthetic antibody
INPDTSKNQFSLQLNSAAPEDTAVYYCARDRTGGYLFDYWGQG

SEQ ID NO: 6064 - protein, 17 aa, Artificial Sequence
  Description of Artificial Sequence: Synthetic antibody
CARGGGWGRTTLPPDYW

SEQ ID NO: 6065 - DNA, 129 bp, Artificial Sequence
  Description of Artificial Sequence: Synthetic antibody
gacacgtctaagaaccagttctccctgaagctgagctctgtgactgccgcggacacggccgtgtattactgtgcgagaggggggggttggggcaggactactttaccccccgactactggggccaggga

SEQ ID NO: 6066 - protein, 43 aa, Artificial Sequence
  Description of Artificial Sequence: Synthetic antibody
DTSKNQFSLKLSSVTAADTAVYYCARGGGWGRTTLPPDYWGQG

SEQ ID NO: 6067 - DNA, 129 bp, Artificial Sequence
  Description of Artificial Sequence: Synthetic antibody
gacacgtctaagaaccagttctccctgaagctgagctctgtgactgccgcggacacggccgtgtattactgtgcgagagggggggggtggggcaggactactttaccccccgactactggggccaggga

SEQ ID NO: 6068 - protein, 21 aa, Artificial Sequence
  Description of Artificial Sequence: Synthetic antibody
CARDQLVLEWLYPTPDAFDIW

SEQ ID NO: 6069 - DNA, 129 bp, Artificial Sequence
  Description of Artificial Sequence: Synthetic antibody
agcactgcctacatggagctgagcagcctgagatctgaggacacggccgtgtattactgtgcgagagatcagctggttttggagtggttatatccaacacccgatgcttttgatatctggggccaaggg

SEQ ID NO: 6070 - protein, 43 aa, Artificial Sequence
  Description of Artificial Sequence: Synthetic antibody
STAYMELSSLRSEDTAVYYCARDQLVLEWLYPTPDAFDIWGQG

SEQ ID NO: 6071 - DNA, 129 bp, Artificial Sequence
  Description of Artificial Sequence: Synthetic antibody
agcacagcctacatggagctgagcagcctgagatctgaggacacggccgtgtattactgtgcgagagatcagctggttttggagtggttatatccaacacccgatgcttttgatatctggggccaaggg

SEQ ID NO: 6072 - protein, 16 aa, Artificial Sequence
  Description of Artificial Sequence: Synthetic antibody
CARGYSGSYYGEVDYW

SEQ ID NO: 6073 - DNA, 129 bp, Artificial Sequence
  Description of Artificial Sequence: Synthetic antibody
caaggacacctccaaaaccaggtggtccttacaatgaccaacatggaccctgtggacacagccacgtattactgtgcacgggggtatagtgggagctactacggggaggttgactactggggccaggga

SEQ ID NO: 6074 - protein, 43 aa, Artificial Sequence
  Description of Artificial Sequence: Synthetic antibody
QGHLQNQVVLTMTNMDPVDTATYYCARGYSGSYYGEVDYWGQG

SEQ ID NO: 6075 - DNA, 129 bp, Artificial Sequence
  Description of Artificial Sequence: Synthetic antibody
aaggacacctccaaaaaccaggtggtccttacaatgaccaacatggaccctgtggacacagccacgtattactgtgcacgggggtatagtgggagctactacggggaggttgactactggggccaggga

SEQ ID NO: 6076 - protein, 43 aa, Artificial Sequence
  Description of Artificial Sequence: Synthetic antibody
KDTSKNQVVLTMTNMDPVDTATYYCARGYSGSYYGEVDYWGQG

SEQ ID NO: 6077 - protein, 11 aa, Artificial Sequence
  Description of Artificial Sequence: Synthetic antibody
CAKVRDIERTW

SEQ ID NO: 6078 - DNA, 129 bp, Artificial Sequence
  Description of Artificial Sequence: Synthetic antibody
cggttcaccatctccagagacaattccaagaacacgctgtatctgcaaatgaacagcctgagagccgaggacacggccgtatattactgtgcgaaagtgagggatattgaaaggacttggggccaggga

SEQ ID NO: 6079 - protein, 43 aa, Artificial Sequence
  Description of Artificial Sequence: Synthetic antibody
RFTISRDNSKNTLYLQMNSLRAEDTAVYYCAKVRDIERTWGQG

SEQ ID NO: 6080 - DNA, 129 bp, Artificial Sequence
  Description of Artificial Sequence: Synthetic antibody
cggttcaccatctccagacacaattccaagaacacgctgtatctgcaaatcaacagcctgagagccgaggacacggccgtatattactgtgcgaaagtgagggatattgaaaggacttggggccaggga

SEQ ID NO: 6081 - protein, 43 aa, Artificial Sequence
  Description of Artificial Sequence: Synthetic antibody
RFTISRHNSKNTLYLQINSLRAEDTAVYYCAKVRDIERTWGQG

SEQ ID NO: 6082 - protein, 21 aa, Artificial Sequence
  Description of Artificial Sequence: Synthetic antibody
CTRPRPCFESHGYDCNVFDMW

SEQ ID NO: 6083 - DNA, 129 bp, Artificial Sequence
  Description of Artificial Sequence: Synthetic antibody
aatacggcgtatctgcaaatgaacagcctgaaaaccgaggacacggccatgtattattgtactagaccgcgtccgtgctttgagagtcatggttatgactgcaatgtttttgatatgtggggccaaggg

SEQ ID NO: 6084 - protein, 43 aa, Artificial Sequence
  Description of Artificial Sequence: Synthetic antibody
NTAYLQMNSLKTEDTAMYYCTRPRPCFESHGYDCNVFDMWGQG

SEQ ID NO: 6085 - DNA, 129 bp, Artificial Sequence
  Description of Artificial Sequence: Synthetic antibody
aacacggcgtatctgcaaatgaacagcctgaaaaccgaggacacggccatgtattattgtactagaccgcgtccgtgctttgagagtcatggttatgactgcaatgtttttgatatgtggggccaaggg

SEQ ID NO: 6086 - protein, 17 aa, Artificial Sequence
  Description of Artificial Sequence: Synthetic antibody
CARESLITVTNNWFDSW

SEQ ID NO: 6087 - DNA, 129 bp, Artificial Sequence
  Description of Artificial Sequence: Synthetic antibody
gacaacgccaagaactccctgtatctgcaaatgaacagtctgaaggccgaggacacggccttctactactgtgcgagagagtccctgattacggtgaccaacaactggttcgactcttggggccaggga

SEQ ID NO: 6088 - protein, 43 aa, Artificial Sequence
  Description of Artificial Sequence: Synthetic antibody
DNAKNSLYLQMNSLKAEDTAFYYCARESLITVTNNWFDSWGQG

SEQ ID NO: 6089 - DNA, 129 bp, Artificial Sequence
  Description of Artificial Sequence: Synthetic antibody
gacaacgccaagaactccctgtatctgcaaatgaacagtctgaaagccgaggacacggccttctactactgtgcgagagagtccctgattacggtgaccaacaactggttcgactcttggggccaggga

SEQ ID NO: 6090 - protein, 15 aa, Artificial Sequence
  Description of Artificial Sequence: Synthetic antibody
CARSHEWELLNFDYW

SEQ ID NO: 6091 - DNA, 129 bp, Artificial Sequence
  Description of Artificial Sequence: Synthetic antibody
tccagagataattccaagaacacgctgtatctgcaaatgaacagcctgagagccgaggacacggccgtatattactgtgcgaggtcccatgagtgggagctactaaactttgactactggggccaggga

SEQ ID NO: 6092 - protein, 43 aa, Artificial Sequence
  Description of Artificial Sequence: Synthetic antibody
SRDNSKNTLYLQMNSLRAEDTAVYYCARSHEWELLNFDYWGQG

SEQ ID NO: 6093 - DNA, 129 bp, Artificial Sequence
  Description of Artificial Sequence: Synthetic antibody
tacagatataattccaagaacacgctgtatctgcaaatgaacagcctgagagccgaggacacggccgtatattactgtgcgaggtcccatgagtgggagctactaaactttgactactggggccaggga

SEQ ID NO: 6094 - protein, 43 aa, Artificial Sequence
  Description of Artificial Sequence: Synthetic antibody
YRYNSKNTLYLQMNSLRAEDTAVYYCARSHEWELLNFDYWGQG

SEQ ID NO: 6095 - protein, 15 aa, Artificial Sequence
  Description of Artificial Sequence: Synthetic antibody
CERMGIAVAGIWGYW

SEQ ID NO: 6096 - DNA, 129 bp, Artificial Sequence
  Description of Artificial Sequence: Synthetic antibody
ctcaagcaacaccctttaagtgcagtctgccttacaatgaccaatctgaaagccaaggacaaggtcatgtattactgtgaaagaatgggtatagcagtggctggtatatggggctactggggccaggga

SEQ ID NO: 6097 - protein, 43 aa, Artificial Sequence
  Description of Artificial Sequence: Synthetic antibody
LKQHPLSAVCLTMTNLKAKDKVMYYCERMGIAVAGIWGYWGQG

SEQ ID NO: 6098 - DNA, 129 bp, Artificial Sequence
  Description of Artificial Sequence: Synthetic antibody
tcaagcaacacccttttaagtgcagtctgccttacaatgaccaatctgaaagccaaggacaaggtcatgtattactgtgaaagaatgggtatagcagtggctggtatatggggctactggggccaggga

SEQ ID NO: 6099 - protein, 43 aa, Artificial Sequence
  Description of Artificial Sequence: Synthetic antibody
SSNTLLSAVCLTMTNLKAKDKVMYYCERMGIAVAGIWGYWGQG

SEQ ID NO: 6100 - protein, 16 aa, Artificial Sequence
  Description of Artificial Sequence: Synthetic antibody
CAKDLGSPGRQAADYW

SEQ ID NO: 6101 - DNA, 129 bp, Artificial Sequence
  Description of Artificial Sequence: Synthetic antibody
agagataattccaagaacacgctgtatctgcaaatgaacagcctgagagccgaggacacggccgtatattactgtgcgaaagatttgggatcacctggaagacaggcagctgactactggggccaggga

SEQ ID NO: 6102 - protein, 43 aa, Artificial Sequence
  Description of Artificial Sequence: Synthetic antibody
RDNSKNTLYLQMNSLRAEDTAVYYCAKDLGSPGRQAADYWGQG

SEQ ID NO: 6103 - DNA, 129 bp, Artificial Sequence
  Description of Artificial Sequence: Synthetic antibody
agagacaatctcaggaataccctctatttgcaaatgaacagcctgagagccgaggacacggccgtttattactgtgcgaaagatttgggatcacctggaagacaggcagctgactactggggccaggga

SEQ ID NO: 6104 - protein, 43 aa, Artificial Sequence
  Description of Artificial Sequence: Synthetic antibody
RDNLRNTLYLQMNSLRAEDTAVYYCAKDLGSPGRQAADYWGQG

SEQ ID NO: 6105 - protein, 14 aa, Artificial Sequence
  Description of Artificial Sequence: Synthetic antibody
CARYGGYDEAFDYW

SEQ ID NO: 6106 - DNA, 129 bp, Artificial Sequence
  Description of Artificial Sequence: Synthetic antibody
ttgtcagtagacacgtccaagaaccagttctccctgaagctgagctctgtgaccgccgcggacacggccgtgtattactgtgcgagatacggggggtacgatgaggcgtttgactactggggccaggga

SEQ ID NO: 6107 - protein, 43 aa, Artificial Sequence
  Description of Artificial Sequence: Synthetic antibody
LSVDTSKNQFSLKLSSVTAADTAVYYCARYGGYDEAFDYWGQG

SEQ ID NO: 6108 - DNA, 129 bp, Artificial Sequence
  Description of Artificial Sequence: Synthetic antibody
atgtcagtagacacgtccaagaaccagttctccctgaagctgagctctgtgaccgccgcggacacggccgtgtattactgtgcgagatacggggggtacgatgaggcgtttgactactggggccaggga

SEQ ID NO: 6109 - protein, 43 aa, Artificial Sequence
  Description of Artificial Sequence: Synthetic antibody
MSVDTSKNQFSLKLSSVTAADTAVYYCARYGGYDEAFDYWGQG

SEQ ID NO: 6110 - protein, 22 aa, Artificial Sequence
  Description of Artificial Sequence: Synthetic antibody
CARSTHDFWSGSFPSGQGFDPW

SEQ ID NO: 6111 - DNA, 129 bp, Artificial Sequence
  Description of Artificial Sequence: Synthetic antibody
ctgttctccctgatgctgagctctgtgaccgccgcagacacggccgtgtattactgtgcgagatctactcacgatttttggagtggttccttcccctcaggccaggggttcgacccctggggccaggga

SEQ ID NO: 6112 - protein, 43 aa, Artificial Sequence
  Description of Artificial Sequence: Synthetic antibody
LFSLMLSSVTAADTAVYYCARSTHDFWSGSFPSGQGFDPWGQG

SEQ ID NO: 6113 - DNA, 129 bp, Artificial Sequence
  Description of Artificial Sequence: Synthetic antibody
cagttctccctgaagctgagctctgtgaccgccgcagacacggccgtgtattactgtgcgagatctactcacgatttttggagtggttccttcccctcaggccaggggttcgacccctggggccaggga

SEQ ID NO: 6114 - protein, 43 aa, Artificial Sequence
  Description of Artificial Sequence: Synthetic antibody
QFSLKLSSVTAADTAVYYCARSTHDFWSGSFPSGQGFDPWGQG

SEQ ID NO: 6115 - protein, 13 aa, Artificial Sequence
  Description of Artificial Sequence: Synthetic antibody
CARVGYAYGLDHW

SEQ ID NO: 6116 - DNA, 129 bp, Artificial Sequence
  Description of Artificial Sequence: Synthetic antibody
accttatcagttgacacgtctaagaaccacttctccctgaaggtgagctctgtgactgctgcggacacggccgtatattactgtgcgagagttgggtacgcctatggtcttgaccactggggccaggga

SEQ ID NO: 6117 - protein, 43 aa, Artificial Sequence
  Description of Artificial Sequence: Synthetic antibody
TLSVDTSKNHFSLKVSSVTAADTAVYYCARVGYAYGLDHWGQG

SEQ ID NO: 6118 - DNA, 129 bp, Artificial Sequence
  Description of Artificial Sequence: Synthetic antibody
accttatcagttgacacgtctaagaaccacttctccctgaaggtgacctctgtgaccgctgcggacacggccgtgtattactgtgcgagagttggatacgcctatggtcttgaccactggggccaggga

SEQ ID NO: 6119 - protein, 43 aa, Artificial Sequence
  Description of Artificial Sequence: Synthetic antibody
TLSVDTSKNHFSLKVTSVTAADTAVYYCARVGYAYGLDHWGQG

SEQ ID NO: 6120 - protein, 17 aa, Artificial Sequence
  Description of Artificial Sequence: Synthetic antibody
CAKDKLFASVPGPFDSW

SEQ ID NO: 6121 - DNA, 129 bp, Artificial Sequence
  Description of Artificial Sequence: Synthetic antibody
cacaattccaagaacacgctgtatctgcaaatgaacagcctgagagccgaggacacggccgtatattactgtgcgaaagataaacttttcgcttcggtccccggtccatttgactcctggggccaggga

SEQ ID NO: 6122 - protein, 43 aa, Artificial Sequence
  Description of Artificial Sequence: Synthetic antibody
HNSKNTLYLQMNSLRAEDTAVYYCAKDKLFASVPGPFDSWGQG

SEQ ID NO: 6123 - DNA, 129 bp, Artificial Sequence
  Description of Artificial Sequence: Synthetic antibody
gacaattccaagaacacgctgtatctgcaaatgaacagcctgagagccgaggacacggccgtatattactgtgcgaaagataaacttttcgcttcggtccccggtccatttgactcctggggccaggga

SEQ ID NO: 6124 - protein, 43 aa, Artificial Sequence
  Description of Artificial Sequence: Synthetic antibody
DNSKNTLYLQMNSLRAEDTAVYYCAKDKLFASVPGPFDSWGQG

SEQ ID NO: 6125 - protein, 12 aa, Artificial Sequence
  Description of Artificial Sequence: Synthetic antibody
CAREGTGVFDYW

SEQ ID NO: 6126 - DNA, 129 bp, Artificial Sequence
  Description of Artificial Sequence: Synthetic antibody
gtcacctttaccgcggacaaatccacgggcacagcctacatggagttgagaggcctgagatctgaggacacggccgtgtatttctgtgcgagagaggggactggcgtctttgactactggggccaggga

SEQ ID NO: 6127 - protein, 43 aa, Artificial Sequence
  Description of Artificial Sequence: Synthetic antibody
VTFTADKSTGTAYMELRGLRSEDTAVYFCAREGTGVFDYWGQG

SEQ ID NO: 6128 - DNA, 129 bp, Artificial Sequence
  Description of Artificial Sequence: Synthetic antibody
gtcacctttaccgcgcacaaatccacgggcacagcctacatggagttgagaggcctgagatctgaggacacggccgtgtatttctgtgcgagagaggggactggcgtctttgactactggggccaggga

SEQ ID NO: 6129 - protein, 43 aa, Artificial Sequence
  Description of Artificial Sequence: Synthetic antibody
VTFTAHKSTGTAYMELRGLRSEDTAVYFCAREGTGVFDYWGQG

SEQ ID NO: 6130 - protein, 22 aa, Artificial Sequence
  Description of Artificial Sequence: Synthetic antibody
CAKDGSGTIFGVVIAKYYFDYW

SEQ ID NO: 6131 - DNA, 129 bp, Artificial Sequence
  Description of Artificial Sequence: Synthetic antibody
acgctgtatctgcaaatgaacagcctgagagccgaggacacggccgtatattactgtgcgaaagacggttccggtacgatttttggagtggttatcgccaaatactactttgactactggggccaggga

SEQ ID NO: 6132 - protein, 43 aa, Artificial Sequence
  Description of Artificial Sequence: Synthetic antibody
TLYLQMNSLRAEDTAVYYCAKDGSGTIFGVVIAKYYFDYWGQG

SEQ ID NO: 6133 - DNA, 129 bp, Artificial Sequence
  Description of Artificial Sequence: Synthetic antibody
acgatgtatctgcaaatgaacagcctgagagccgaggacacggccgtatattactgtgcgaaagacggttccggtacgatttttggagtggttatcgccaaatactactttgactactggggccaggga

SEQ ID NO: 6134 - protein, 43 aa, Artificial Sequence
  Description of Artificial Sequence: Synthetic antibody
TMYLQMNSLRAEDTAVYYCAKDGSGTIFGVVIAKYYFDYWGQG

SEQ ID NO: 6135 - protein, 14 aa, Artificial Sequence
  Description of Artificial Sequence: Synthetic antibody
CASGSGPGLWLEYW

SEQ ID NO: 6136 - DNA, 129 bp, Artificial Sequence
  Description of Artificial Sequence: Synthetic antibody
atctccatacacaattccaagaacacgctgtatcttcaaatgaacagcctgagagccgaggacacggccgtgtattactgtgcgagcgggtccgggccggggctatggttagaatactggggccaggga

SEQ ID NO: 6137 - protein, 43 aa, Artificial Sequence
  Description of Artificial Sequence: Synthetic antibody
ISIHNSKNTLYLQMNSLRAEDTAVYYCASGSGPGLWLEYWGQG

SEQ ID NO: 6138 - DNA, 129 bp, Artificial Sequence
  Description of Artificial Sequence: Synthetic antibody
atctccagagacaattccaagaacacgctgtatcttcaaatgaacagcctgagagccgaggacacggccgtgtattactgtgcgagcgggtccgggccggggctatggttagaatactggggccaggga

SEQ ID NO: 6139 - protein, 43 aa, Artificial Sequence
  Description of Artificial Sequence: Synthetic antibody
ISRDNSKNTLYLQMNSLRAEDTAVYYCASGSGPGLWLEYWGQG

SEQ ID NO: 6140 - protein, 21 aa, Artificial Sequence
  Description of Artificial Sequence: Synthetic antibody
CANSLPQSGYEDYYYYGMDVW

SEQ ID NO: 6141 - DNA, 129 bp, Artificial Sequence
  Description of Artificial Sequence: Synthetic antibody
tacacgctgtatctgcaaatcaacagcctgagagccgaggacacggccgtatattactgtgcgaacagcctccctcaaagtggctacgaagactactactactacggtatggacgtctggggccaaggg

SEQ ID NO: 6142 - protein, 43 aa, Artificial Sequence
  Description of Artificial Sequence: Synthetic antibody
YTLYLQINSLRAEDTAVYYCANSLPQSGYEDYYYYGMDVWGQG

SEQ ID NO: 6143 - DNA, 129 bp, Artificial Sequence
  Description of Artificial Sequence: Synthetic antibody
aacacgctgtatctgcaaatgaacagcctgagagccgaggacacggccgtatattactgtgcgaacagcctccctcaaagtggctacgaagactactactactacggtatggacgtctggggccaaggg

SEQ ID NO: 6144 - protein, 43 aa, Artificial Sequence
  Description of Artificial Sequence: Synthetic antibody
NTLYLQMNSLRAEDTAVYYCANSLPQSGYEDYYYYGMDVWGQG

SEQ ID NO: 6145 - protein, 14 aa, Artificial Sequence
  Description of Artificial Sequence: Synthetic antibody
CARDLDSSYGMDVW

SEQ ID NO: 6146 - DNA, 129 bp, Artificial Sequence
  Description of Artificial Sequence: Synthetic antibody
ttgaccagggacacgtccacgagcacagtctacatggagctgagcagcctgatatctgaggacacggccgtgtattactgtgcgagagatctggactcatcctacggtatggacgtctggggccaaggg

SEQ ID NO: 6147 - protein, 43 aa, Artificial Sequence
  Description of Artificial Sequence: Synthetic antibody
LTRDTSTSTVYMELSSLISEDTAVYYCARDLDSSYGMDVWGQG

SEQ ID NO: 6148 - DNA, 129 bp, Artificial Sequence
  Description of Artificial Sequence: Synthetic antibody
atgaccagggacacgtccacgagcacagtctacatggagctgagcagcctgagatctgaggacacggccgtgtattactgtgcgagagatctggactcatcctacggtatggacgtctggggccaaggg

SEQ ID NO: 6149 - protein, 43 aa, Artificial Sequence
  Description of Artificial Sequence: Synthetic antibody
MTRDTSTSTVYMELSSLRSEDTAVYYCARDLDSSYGMDVWGQG

SEQ ID NO: 6150 - protein, 17 aa, Artificial Sequence
  Description of Artificial Sequence: Synthetic antibody
CARTVFYSGSYLLFDYW

SEQ ID NO: 6151 - DNA, 129 bp, Artificial Sequence
  Description of Artificial Sequence: Synthetic antibody
gacacctccaaaaaccaggtggtccttacaatgaccaacatggaccctgtggacacagccacgtattactgtgcacggaccgtcttttatagtgggagctaccttctctttgactactggggccaggga

SEQ ID NO: 6152 - protein, 43 aa, Artificial Sequence
  Description of Artificial Sequence: Synthetic antibody
DTSKNQVVLTMTNMDPVDTATYYCARTVFYSGSYLLFDYWGQG

SEQ ID NO: 6153 - DNA, 129 bp, Artificial Sequence
  Description of Artificial Sequence: Synthetic antibody
ggacacctccaaaaccaggtggtccttacaatgaccaacatggaccctgtggacacagccacgtattactgtgcacggaccgtcttttatagtgggagctaccttctctttgactactggggccaggga

SEQ ID NO: 6154 - protein, 43 aa, Artificial Sequence
  Description of Artificial Sequence: Synthetic antibody
GHLQNQVVLTMTNMDPVDTATYYCARTVFYSGSYLLFDYWGQG

SEQ ID NO: 6155 - protein, 12 aa, Artificial Sequence
  Description of Artificial Sequence: Synthetic antibody
CAHLSRDGYNPW

SEQ ID NO: 6156 - DNA, 129 bp, Artificial Sequence
  Description of Artificial Sequence: Synthetic antibody
gctcaccatcaccaaggacacctccaaaaccaggtggtccttacaatgaccaacatggaccctgtggacacagccacatattactgtgcacacctgtcgcgagatggctacaatccgtggggccaggga

SEQ ID NO: 6157 - protein, 43 aa, Artificial Sequence
  Description of Artificial Sequence: Synthetic antibody
AHHHQGHLQNQVVLTMTNMDPVDTATYYCAHLSRDGYNPWGQG

SEQ ID NO: 6158 - DNA, 129 bp, Artificial Sequence
  Description of Artificial Sequence: Synthetic antibody
ctcaccatcaccaaggacacctccaaaaaccaggtggtccttacaatgaccaacatggaccctgtggacacagccacatattactgtgcacacctgtcgcgagatggctacaatccgtggggccaggga

SEQ ID NO: 6159 - protein, 43 aa, Artificial Sequence
  Description of Artificial Sequence: Synthetic antibody
LTITKDTSKNQVVLTMTNMDPVDTATYYCAHLSRDGYNPWGQG

SEQ ID NO: 6160 - protein, 19 aa, Artificial Sequence
  Description of Artificial Sequence: Synthetic antibody
CTTVSIATRGYYYYGMDVW

SEQ ID NO: 6161 - DNA, 129 bp, Artificial Sequence
  Description of Artificial Sequence: Synthetic antibody
tcaaaaaacacgctgtatctgcaaatgaacagcctgaaaaccgaggacacagccgtgtattactgtaccacagtgagtatagcaactcgaggctactactactacggtatggacgtctggggccaaggg

SEQ ID NO: 6162 - protein, 43 aa, Artificial Sequence
  Description of Artificial Sequence: Synthetic antibody
SKNTLYLQMNSLKTEDTAVYYCTTVSIATRGYYYYGMDVWGQG

SEQ ID NO: 6163 - DNA, 129 bp, Artificial Sequence
  Description of Artificial Sequence: Synthetic antibody
ttcaaaaacacgctgtatctgcaaatgaacagcctgaaaaccgaggacacagccgtgtattactgtaccacagtgagtatagcaactcgaggctactactactacggtatggacgtctggggccaaggg

SEQ ID NO: 6164 - protein, 43 aa, Artificial Sequence
  Description of Artificial Sequence: Synthetic antibody
FKNTLYLQMNSLKTEDTAVYYCTTVSIATRGYYYYGMDVWGQG

SEQ ID NO: 6165 - protein, 21 aa, Artificial Sequence
  Description of Artificial Sequence: Synthetic antibody
CARDTTTERWMDYYYYGMDVW

SEQ ID NO: 6166 - DNA, 129 bp, Artificial Sequence
  Description of Artificial Sequence: Synthetic antibody
tgcacagcctacttggagctgagcagcctgagatctgaggacacggccgtgtattactgtgcgagagataccaccacggagcgttggatggattactactactacggtatggacgtctggggccaaggg

SEQ ID NO: 6167 - protein, 43 aa, Artificial Sequence
  Description of Artificial Sequence: Synthetic antibody
CTAYLELSSLRSEDTAVYYCARDTTTERWMDYYYYGMDVWGQG

SEQ ID NO: 6168 - DNA, 129 bp, Artificial Sequence
  Description of Artificial Sequence: Synthetic antibody
agcacagcctacatggagctgagcagcctgagatctgaggacacggccgtgtattactgtgcgagagataccaccacggagcgttggatggattactactactacggtatggacgtctggggccaaggg

SEQ ID NO: 6169 - protein, 43 aa, Artificial Sequence
  Description of Artificial Sequence: Synthetic antibody
STAYMELSSLRSEDTAVYYCARDTTTERWMDYYYYGMDVWGQG

SEQ ID NO: 6170 - protein, 16 aa, Artificial Sequence
  Description of Artificial Sequence: Synthetic antibody
CAKDSGIAVAGYFDYW

SEQ ID NO: 6171 - DNA, 129 bp, Artificial Sequence
  Description of Artificial Sequence: Synthetic antibody
agagacaacgccaagagctccctgtatctgcagatgaacagtctgagagctgaggacacggccttgtattactgtgcaaaagatagtggtatagcagtggctggctactttgactactggggccaggga

SEQ ID NO: 6172 - protein, 43 aa, Artificial Sequence
  Description of Artificial Sequence: Synthetic antibody
RDNAKSSLYLQMNSLRAEDTALYYCAKDSGIAVAGYFDYWGQG

SEQ ID NO: 6173 - DNA, 129 bp, Artificial Sequence
  Description of Artificial Sequence: Synthetic antibody
agagacaacgccaagaactccctgtatctgcaaatgaacagtctgagagctgaggacacggccttgtattactgtgcaaaagatagtggtatagcagtggctggctactttgactactggggccaggga

SEQ ID NO: 6174 - protein, 43 aa, Artificial Sequence
  Description of Artificial Sequence: Synthetic antibody
RDNAKNSLYLQMNSLRAEDTALYYCAKDSGIAVAGYFDYWGQG

SEQ ID NO: 6175 - protein, 15 aa, Artificial Sequence
  Description of Artificial Sequence: Synthetic antibody
CATYSSSSSRWFDPW

SEQ ID NO: 6176 - DNA, 129 bp, Artificial Sequence
  Description of Artificial Sequence: Synthetic antibody
tccagagacatttccaagaatatgttgtatctgcaaatgaacagcctgagagccgaggacacggccgtatattactgtgctacatatagtagctcgtcttccaggtggttcgacccctggggccaggga

SEQ ID NO: 6177 - protein, 43 aa, Artificial Sequence
  Description of Artificial Sequence: Synthetic antibody
SRDISKNMLYLQMNSLRAEDTAVYYCATYSSSSSRWFDPWGQG

SEQ ID NO: 6178 - DNA, 129 bp, Artificial Sequence
  Description of Artificial Sequence: Synthetic antibody
tacagagacatttccaataatatgttgtatctgcaaatgaacagcctgagagccgaggacacggccgtatattactgtgctacatatagtagctcgtcttccaggtggttcgacccctggggccaggga

SEQ ID NO: 6179 - protein, 43 aa, Artificial Sequence
  Description of Artificial Sequence: Synthetic antibody
YRDISNNMLYLQMNSLRAEDTAVYYCATYSSSSSRWFDPWGQG

SEQ ID NO: 6180 - protein, 14 aa, Artificial Sequence
  Description of Artificial Sequence: Synthetic antibody
CARSRSRLYAFDIW

SEQ ID NO: 6181 - DNA, 129 bp, Artificial Sequence
  Description of Artificial Sequence: Synthetic antibody
attaccagggacaggtctatgagcacagcctacatggagctgagcagcctgagatctgaggacgcagccatgtattactgtgcaagatcacggtcccgattgtatgcttttgatatctggggccaaggg

SEQ ID NO: 6182 - protein, 43 aa, Artificial Sequence
  Description of Artificial Sequence: Synthetic antibody
ITRDRSMSTAYMELSSLRSEDAAMYYCARSRSRLYAFDIWGQG

SEQ ID NO: 6183 - DNA, 129 bp, Artificial Sequence
  Description of Artificial Sequence: Synthetic antibody
attaccagggacaggtctatgagcacagcctacatggagctgagcagcctgagatctgaggacacagccatgtattactgtgcaagatcacggtcccgattgtatgcttttgatatctggggccaaggg

SEQ ID NO: 6184 - protein, 43 aa, Artificial Sequence
  Description of Artificial Sequence: Synthetic antibody
ITRDRSMSTAYMELSSLRSEDTAMYYCARSRSRLYAFDIWGQG

SEQ ID NO: 6185 - protein, 16 aa, Artificial Sequence
  Description of Artificial Sequence: Synthetic antibody
CTRHNWNFEYNWFDPW

SEQ ID NO: 6186 - DNA, 129 bp, Artificial Sequence
  Description of Artificial Sequence: Synthetic antibody
agatatgattcaaacaacacggcgtatctgcaaatgaacagcctgaaaaccgaggacacggccgtgtattactgtactagacataactggaacttcgagtacaactggttcgacccctggggccaggga

SEQ ID NO: 6187 - protein, 43 aa, Artificial Sequence
  Description of Artificial Sequence: Synthetic antibody
RYDSNNTAYLQMNSLKTEDTAVYYCTRHNWNFEYNWFDPWGQG

SEQ ID NO: 6188 - DNA, 129 bp, Artificial Sequence
  Description of Artificial Sequence: Synthetic antibody
agagatgattcaaagaacacggcgtatctgcaaatgaacagcctgaaaaccgaggacacggccgtgtattactgtactagacataactggaacttcgagtacaactggttcgacccctggggccaggga

SEQ ID NO: 6189 - protein, 43 aa, Artificial Sequence
  Description of Artificial Sequence: Synthetic antibody
RDDSKNTAYLQMNSLKTEDTAVYYCTRHNWNFEYNWFDPWGQG

SEQ ID NO: 6190 - protein, 12 aa, Artificial Sequence
  Description of Artificial Sequence: Synthetic antibody
CARDEVRYFDYW

SEQ ID NO: 6191 - DNA, 129 bp, Artificial Sequence
  Description of Artificial Sequence: Synthetic antibody
gtcaccatatcagtagacacgtccaagaaccagttctccctgaagctgagctctgtgaccgccgcggacacggccgtgtattactgtgcgagagatgaggtccgatactttgactactggggccaggga

SEQ ID NO: 6192 - protein, 43 aa, Artificial Sequence
  Description of Artificial Sequence: Synthetic antibody
VTISVDTSKNQFSLKLSSVTAADTAVYYCARDEVRYFDYWGQG

SEQ ID NO: 6193 - DNA, 129 bp, Artificial Sequence
  Description of Artificial Sequence: Synthetic antibody
gtcaccatatcagtacacacgtccaagaaccagttctccctgaagctgagctctgtgaccgccgcggacacggccgtgtattactgtgcgagagatgaggtccgatactttgactactggggccaggga

SEQ ID NO: 6194 - protein, 43 aa, Artificial Sequence
  Description of Artificial Sequence: Synthetic antibody
VTISVHTSKNQFSLKLSSVTAADTAVYYCARDEVRYFDYWGQG

SEQ ID NO: 6195 - protein, 19 aa, Artificial Sequence
  Description of Artificial Sequence: Synthetic antibody
CARQYYDYVWGSYRHFDYW

SEQ ID NO: 6196 - DNA, 129 bp, Artificial Sequence
  Description of Artificial Sequence: Synthetic antibody
gccaaaaccccggtggtccttacaatgaccaacatggaccctgtggacacagccacatattactgtgcacgacagtattatgattacgtttgggggagttatcgccactttgactactggggccaggga

SEQ ID NO: 6197 - protein, 43 aa, Artificial Sequence
  Description of Artificial Sequence: Synthetic antibody
AKTPVVLTMTNMDPVDTATYYCARQYYDYVWGSYRHFDYWGQG

SEQ ID NO: 6198 - DNA, 129 bp, Artificial Sequence
  Description of Artificial Sequence: Synthetic antibody
gccaaaaaccaggtggtccttacaatgaccaacatggaccctgtggacacagccacatattactgtgcacgacagtattatgattacgtttgggggagttatcgccactttgactactggggccaggga

SEQ ID NO: 6199 - protein, 43 aa, Artificial Sequence
  Description of Artificial Sequence: Synthetic antibody
AKNQVVLTMTNMDPVDTATYYCARQYYDYVWGSYRHFDYWGQG

SEQ ID NO: 6200 - protein, 15 aa, Artificial Sequence
  Description of Artificial Sequence: Synthetic antibody
CAREGRATESGMDVW

SEQ ID NO: 6201 - DNA, 129 bp, Artificial Sequence
  Description of Artificial Sequence: Synthetic antibody
accaggaacacctccataagcacagcctacatggggctgagcagcctgagatctgaggacacggccgtgtattactgtgcgagagagggacgggctacggagtccggtatggacgtctggggccaaggg

SEQ ID NO: 6202 - protein, 43 aa, Artificial Sequence
  Description of Artificial Sequence: Synthetic antibody
TRNTSISTAYMGLSSLRSEDTAVYYCAREGRATESGMDVWGQG

SEQ ID NO: 6203 - DNA, 129 bp, Artificial Sequence
  Description of Artificial Sequence: Synthetic antibody
accaggaacacctccataagcacagcctacatggagctgagcagcctgagatctgaggacacggccgtgtattactgtgcgagagagggacgggctacggagtccggtatggacgtctggggccaaggg

SEQ ID NO: 6204 - protein, 43 aa, Artificial Sequence
  Description of Artificial Sequence: Synthetic antibody
TRNTSISTAYMELSSLRSEDTAVYYCAREGRATESGMDVWGQG

SEQ ID NO: 6205 - protein, 12 aa, Artificial Sequence
  Description of Artificial Sequence: Synthetic antibody
CAHRLYNWFDPW

SEQ ID NO: 6206 - DNA, 129 bp, Artificial Sequence
  Description of Artificial Sequence: Synthetic antibody
actcaccatcaccaaggacacctccaaaaccaggtggtccttacaatgaccgacttggaccctgtggacacagccacatattactgtgcacacagactctataattggttcgacccctggggccaggga

SEQ ID NO: 6207 - protein, 43 aa, Artificial Sequence
  Description of Artificial Sequence: Synthetic antibody
THHHQGHLQNQVVLTMTDLDPVDTATYYCAHRLYNWFDPWGQG

SEQ ID NO: 6208 - DNA, 129 bp, Artificial Sequence
  Description of Artificial Sequence: Synthetic antibody
ctcaccatcaccaaggacacctccaaaaaccaggtggtccttacaatgaccgacttggaccctgtggacacagccacatattactgtgcacacagactctataattggttcgacccctggggccaggga

SEQ ID NO: 6209 - protein, 43 aa, Artificial Sequence
  Description of Artificial Sequence: Synthetic antibody
LTITKDTSKNQVVLTMTDLDPVDTATYYCAHRLYNWFDPWGQG

SEQ ID NO: 6210 - protein, 23 aa, Artificial Sequence
  Description of Artificial Sequence: Synthetic antibody
CARYCSSTTCYVPEGHYYSMDVW

SEQ ID NO: 6211 - DNA, 129 bp, Artificial Sequence
  Description of Artificial Sequence: Synthetic antibody
ctttatctgcaaatgaacagcctgcgagacgaggacacgggtgtctattactgtgcgagatattgtagtagtaccacctgctatgtcccggaggggcactactactctatggacgtctggggccgaggg

SEQ ID NO: 6212 - protein, 43 aa, Artificial Sequence
  Description of Artificial Sequence: Synthetic antibody
LYLQMNSLRDEDTGVYYCARYCSSTTCYVPEGHYYSMDVWGRG

SEQ ID NO: 6213 - DNA, 129 bp, Artificial Sequence
  Description of Artificial Sequence: Synthetic antibody
ctttatctgcaaatgaacagcctgagagacgaggacacgggtgtatattactgtgcgagatattgtagtagtaccacctgctatgtcccggaggggcactactactctatggacgtctggggccgaggg

SEQ ID NO: 6214 - protein, 14 aa, Artificial Sequence
  Description of Artificial Sequence: Synthetic antibody
CARDKNGDYYFDSW

SEQ ID NO: 6215 - DNA, 129 bp, Artificial Sequence
  Description of Artificial Sequence: Synthetic antibody
ttatcagtagacacgtccaagaaccagttctccctgaacctgagctctgtgaccgccgcggacacggccgtgtattattgtgcgagagataaaaacggtgactactactttgactcctggggccaggga

SEQ ID NO: 6216 - protein, 43 aa, Artificial Sequence
  Description of Artificial Sequence: Synthetic antibody
LSVDTSKNQFSLNLSSVTAADTAVYYCARDKNGDYYFDSWGQG

SEQ ID NO: 6217 - DNA, 129 bp, Artificial Sequence
  Description of Artificial Sequence: Synthetic antibody
atatcagtagacacgtccaagaaccagttctccctgaacctgagctctgtgaccgccgcggacacggccgtgtattattgtgcgagagataaaaacggtgactactactttgactcctggggccaggga

SEQ ID NO: 6218 - protein, 43 aa, Artificial Sequence
  Description of Artificial Sequence: Synthetic antibody
ISVDTSKNQFSLNLSSVTAADTAVYYCARDKNGDYYFDSWGQG

SEQ ID NO: 6219 - protein, 21 aa, Artificial Sequence
  Description of Artificial Sequence: Synthetic antibody
CARDLDTMIVVVKADDAFDIW

SEQ ID NO: 6220 - DNA, 129 bp, Artificial Sequence
  Description of Artificial Sequence: Synthetic antibody
agcactgcctacatggagctgtggagcctgagatctgacgacacggccgtgtattactgtgcgagagatctggatactatgatagtagtggttaaggccgatgatgcttttgatatctggggccaaggg

SEQ ID NO: 6221 - protein, 43 aa, Artificial Sequence
  Description of Artificial Sequence: Synthetic antibody
STAYMELWSLRSDDTAVYYCARDLDTMIVVVKADDAFDIWGQG

SEQ ID NO: 6222 - DNA, 129 bp, Artificial Sequence
  Description of Artificial Sequence: Synthetic antibody
agcacagcctacatggagctgaggagcctgagatctgacgacacggccgtgtattactgtgcgagagatctggatactatgatagtagtggttaaggccgatgatgcttttgatatctggggccaaggg

SEQ ID NO: 6223 - protein, 43 aa, Artificial Sequence
  Description of Artificial Sequence: Synthetic antibody
STAYMELRSLRSDDTAVYYCARDLDTMIVVVKADDAFDIWGQG

SEQ ID NO: 6224 - protein, 16 aa, Artificial Sequence
  Description of Artificial Sequence: Synthetic antibody
CARDFGVGLAWYSDLW

SEQ ID NO: 6225 - DNA, 129 bp, Artificial Sequence
  Description of Artificial Sequence: Synthetic antibody
tgggacacgtccatcagtacagtctacatggagctgagcaggctgagatctgacgacacggccgtgtattcctgtgcgagagatttcggggtcgggttggcctggtactccgatctctggggccgtggc

SEQ ID NO: 6226 - protein, 43 aa, Artificial Sequence
  Description of Artificial Sequence: Synthetic antibody
WDTSISTVYMELSRLRSDDTAVYSCARDFGVGLAWYSDLWGRG

SEQ ID NO: 6227 - DNA, 129 bp, Artificial Sequence
  Description of Artificial Sequence: Synthetic antibody
agggacacgtccatcagtacagtctacatggagctgagcaggctgagatctgacgacacggccgtgtattcctgtgcgagagatttcggggtcgggttggcctggtactccgatctctggggccgtggc

SEQ ID NO: 6228 - protein, 43 aa, Artificial Sequence
  Description of Artificial Sequence: Synthetic antibody
RDTSISTVYMELSRLRSDDTAVYSCARDFGVGLAWYSDLWGRG

SEQ ID NO: 6229 - protein, 18 aa, Artificial Sequence
  Description of Artificial Sequence: Synthetic antibody
CARRYCSSTSCYWSFDYW

SEQ ID NO: 6230 - DNA, 129 bp, Artificial Sequence
  Description of Artificial Sequence: Synthetic antibody
aagtccatcagcaccgcctacctgcagtggagcagcctgaaggcctcggacaccgccatgtattactgtgcgagacggtattgtagtagtaccagctgctattggagttttgactactggggccaggga

SEQ ID NO: 6231 - protein, 43 aa, Artificial Sequence
  Description of Artificial Sequence: Synthetic antibody
KSISTAYLQWSSLKASDTAMYYCARRYCSSTSCYWSFDYWGQG

SEQ ID NO: 6232 - DNA, 129 bp, Artificial Sequence
  Description of Artificial Sequence: Synthetic antibody
aagtccatcagcaccgcctacctgcagtggagcagcctgaaggcctcggacaccaccatgtattactgtgcgagacggtattgtagtagtaccagctgctattggagttttgactactggggccgggga

SEQ ID NO: 6233 - protein, 43 aa, Artificial Sequence
  Description of Artificial Sequence: Synthetic antibody
KSISTAYLQWSSLKASDTTMYYCARRYCSSTSCYWSFDYWGRG

SEQ ID NO: 6234 - protein, 15 aa, Artificial Sequence
  Description of Artificial Sequence: Synthetic antibody
CAKEFETKSGYGDYW

SEQ ID NO: 6235 - DNA, 129 bp, Artificial Sequence
  Description of Artificial Sequence: Synthetic antibody
ttcagagacaactccaagaacacactgtatctgcagatgaacagtctgagagccgaggacacggccatatattactgtgcgaaagagttcgaaaccaaaagtggatatggggactactggggccagggc

SEQ ID NO: 6236 - protein, 43 aa, Artificial Sequence
  Description of Artificial Sequence: Synthetic antibody
FRDNSKNTLYLQMNSLRAEDTAIYYCAKEFETKSGYGDYWGQG

SEQ ID NO: 6237 - DNA, 129 bp, Artificial Sequence
  Description of Artificial Sequence: Synthetic antibody
tccagagacaattacaagaacacactgtatctgcaaatgaacagcctgagagccgaggacacggccatatattactgtgcgaaagagttcgaaaccaaaagtggatatggggactactggggccaggga

SEQ ID NO: 6238 - protein, 43 aa, Artificial Sequence
  Description of Artificial Sequence: Synthetic antibody
SRDNYKNTLYLQMNSLRAEDTAIYYCAKEFETKSGYGDYWGQG

SEQ ID NO: 6239 - protein, 16 aa, Artificial Sequence
  Description of Artificial Sequence: Synthetic antibody
CARVLLRYSGSSFDYW

SEQ ID NO: 6240 - DNA, 129 bp, Artificial Sequence
  Description of Artificial Sequence: Synthetic antibody
gtagacacgtccaagaaccagttctccctgaagctgagctctgtgaccgccgcggacacggctgtgtattactgtgcgagagttttgttgcggtatagtgggagctcgtttgactactggggccaggga

SEQ ID NO: 6241 - protein, 43 aa, Artificial Sequence
  Description of Artificial Sequence: Synthetic antibody
VDTSKNQFSLKLSSVTAADTAVYYCARVLLRYSGSSFDYWGQG

SEQ ID NO: 6242 - DNA, 129 bp, Artificial Sequence
  Description of Artificial Sequence: Synthetic antibody
gtagacacgtccaagaaccagttctccctgaagctgagctctgcgaccgccgcggacacggctgtgtattactgtgcgagagttttgttgcggtatagtgggagctcgtttgactactggggccaggga

SEQ ID NO: 6243 - protein, 43 aa, Artificial Sequence
  Description of Artificial Sequence: Synthetic antibody
VDTSKNQFSLKLSSATAADTAVYYCARVLLRYSGSSFDYWGQG

SEQ ID NO: 6244 - protein, 12 aa, Artificial Sequence
  Description of Artificial Sequence: Synthetic antibody
CTTAVTPALDYW

SEQ ID NO: 6245 - DNA, 129 bp, Artificial Sequence
  Description of Artificial Sequence: Synthetic antibody
ttcaccatctcaggagatgattcaaaaaacacgctgtatctgcaaatgaacagcctgaaaaccgaggacacagccgtgtattactgtaccacagcggtgacgccagctcttgactactggggccaggga

SEQ ID NO: 6246 - protein, 43 aa, Artificial Sequence
  Description of Artificial Sequence: Synthetic antibody
FTISGDDSKNTLYLQMNSLKTEDTAVYYCTTAVTPALDYWGQG

SEQ ID NO: 6247 - DNA, 129 bp, Artificial Sequence
  Description of Artificial Sequence: Synthetic antibody
ttcaccatctcaagagatgattcaaaaaacacgctgtatctgcaaatgaacagcctgaaaaccgaggacacagccgtgtattactgtaccacagcggtgacgccagctcttgactactggggccaggga

SEQ ID NO: 6248 - protein, 43 aa, Artificial Sequence
  Description of Artificial Sequence: Synthetic antibody
FTISRDDSKNTLYLQMNSLKTEDTAVYYCTTAVTPALDYWGQG

SEQ ID NO: 6249 - protein, 15 aa, Artificial Sequence
  Description of Artificial Sequence: Synthetic antibody
CAHVRSPSMGAFWIW

SEQ ID NO: 6250 - DNA, 129 bp, Artificial Sequence
  Description of Artificial Sequence: Synthetic antibody
accaaggacacctccaaaaaccaggtggtccttacaatgaccaacatggaccctgtggacacagccacatatttctgtgcacacgtccgttctccgagcatgggtgctttttggatctggggccaaggg

SEQ ID NO: 6251 - protein, 43 aa, Artificial Sequence
  Description of Artificial Sequence: Synthetic antibody
TKDTSKNQVVLTMTNMDPVDTATYFCAHVRSPSMGAFWIWGQG

SEQ ID NO: 6252 - DNA, 129 bp, Artificial Sequence
  Description of Artificial Sequence: Synthetic antibody
accaaggacacctccaaaaaccaggtggtccttacaatgaccaacatggaccctgtggacacagccacatatttctgtgcacacgtccgttctccgagcatgggtgccttttggatctggggccaaggg

SEQ ID NO: 6253 - protein, 15 aa, Artificial Sequence
  Description of Artificial Sequence: Synthetic antibody
CARMESGTYQDLDYW

SEQ ID NO: 6254 - DNA, 129 bp, Artificial Sequence
  Description of Artificial Sequence: Synthetic antibody
accagtgacacgtccacgagcacagtctacatggagctgaacagcctgatatctgaagacacggccgtgtattactgtgcgagaatggagagtgggacctaccaagaccttgactactggggccaggga

SEQ ID NO: 6255 - protein, 43 aa, Artificial Sequence
  Description of Artificial Sequence: Synthetic antibody
TSDTSTSTVYMELNSLISEDTAVYYCARMESGTYQDLDYWGQG

SEQ ID NO: 6256 - DNA, 129 bp, Artificial Sequence
  Description of Artificial Sequence: Synthetic antibody
accagtgacacgtccacgagcacagtctacatggagctgaacagcctgagatctgaagacacggccgtgtattactgtgcgagaatggagagtgggacctaccaagaccttgactactggggccaggga

SEQ ID NO: 6257 - protein, 43 aa, Artificial Sequence
  Description of Artificial Sequence: Synthetic antibody
TSDTSTSTVYMELNSLRSEDTAVYYCARMESGTYQDLDYWGQG

SEQ ID NO: 6258 - protein, 23 aa, Artificial Sequence
  Description of Artificial Sequence: Synthetic antibody
CARDEGHYYGSEGGYYYYGMDVW

SEQ ID NO: 6259 - DNA, 129 bp, Artificial Sequence
  Description of Artificial Sequence: Synthetic antibody
gcctacatggcgctgagcagcctgagatctgaggacacggccgtgtattactgtgcgagagacgaggggcattactatggttcagaggggggctactactactacggtatggacgtctggggccaaggg

SEQ ID NO: 6260 - protein, 43 aa, Artificial Sequence
  Description of Artificial Sequence: Synthetic antibody
AYMALSSLRSEDTAVYYCARDEGHYYGSEGGYYYYGMDVWGQG

SEQ ID NO: 6261 - DNA, 129 bp, Artificial Sequence
  Description of Artificial Sequence: Synthetic antibody
gcctacatggagctgagcagcctgagatctgaggacacggccgtgtattactgtgcgagagacgaggggcattactatggttcagaggggggctactactactacggtatggacgtctggggccaaggg

SEQ ID NO: 6262 - protein, 43 aa, Artificial Sequence
  Description of Artificial Sequence: Synthetic antibody
AYMELSSLRSEDTAVYYCARDEGHYYGSEGGYYYYGMDVWGQG

SEQ ID NO: 6263 - protein, 18 aa, Artificial Sequence
  Description of Artificial Sequence: Synthetic antibody
CAKDRTTLRWVLGGMDVW

SEQ ID NO: 6264 - DNA, 129 bp, Artificial Sequence
  Description of Artificial Sequence: Synthetic antibody
aacagcaaaaactccctgtatctgcaaatgaacagtctgagagctgaggacaccgccttgtattactgtgcaaaagatcggacgaccttacgttgggttctggggggtatggacgtctggggccaaggg

SEQ ID NO: 6265 - protein, 43 aa, Artificial Sequence
  Description of Artificial Sequence: Synthetic antibody
NSKNSLYLQMNSLRAEDTALYYCAKDRTTLRWVLGGMDVWGQG

SEQ ID NO: 6266 - DNA, 129 bp, Artificial Sequence
  Description of Artificial Sequence: Synthetic antibody
caacagcaaaactccctgtatctgcaaatgaacagtctgagagctgaggacaccgccttgtattactgtgcaaaagatcggacgaccttacgttgggttctggggggtatggacgtctggggccaaggg

SEQ ID NO: 6267 - protein, 43 aa, Artificial Sequence
  Description of Artificial Sequence: Synthetic antibody
QQQNSLYLQMNSLRAEDTALYYCAKDRTTLRWVLGGMDVWGQG

SEQ ID NO: 6268 - protein, 15 aa, Artificial Sequence
  Description of Artificial Sequence: Synthetic antibody
CAKEFETKTGYGDYW

SEQ ID NO: 6269 - DNA, 129 bp, Artificial Sequence
  Description of Artificial Sequence: Synthetic antibody
tccagagacaattccaagaacattctgtatctgcaaatgaacagcctgagagccgaggacacggccacatattactgtgcgaaagagttcgaaaccaaaactggatatggggactactggggccagggc

SEQ ID NO: 6270 - protein, 43 aa, Artificial Sequence
  Description of Artificial Sequence: Synthetic antibody
SRDNSKNILYLQMNSLRAEDTATYYCAKEFETKTGYGDYWGQG

SEQ ID NO: 6271 - DNA, 129 bp, Artificial Sequence
  Description of Artificial Sequence: Synthetic antibody
tccagagacaattccaagaacacactgtatctgcaaatgaacagcctgagagccgaggacacggccatatattactgtgcgaaagagttcgaaaccaaaactggatatggggactactggggccagggc

SEQ ID NO: 6272 - protein, 43 aa, Artificial Sequence
  Description of Artificial Sequence: Synthetic antibody
SRDNSKNTLYLQMNSLRAEDTAIYYCAKEFETKTGYGDYWGQG

SEQ ID NO: 6273 - protein, 16 aa, Artificial Sequence
  Description of Artificial Sequence: Synthetic antibody
CAKDLYSSSSGGFDYW

SEQ ID NO: 6274 - DNA, 129 bp, Artificial Sequence
  Description of Artificial Sequence: Synthetic antibody
agggacaacgccaagaactccctgtatctgcaaatgaacagtctgagagctgaggacacggccttgtattactgtgcaaaagacctgtatagcagcagctcagggggctttgactactggggccagggg

SEQ ID NO: 6275 - protein, 43 aa, Artificial Sequence
  Description of Artificial Sequence: Synthetic antibody
RDNAKNSLYLQMNSLRAEDTALYYCAKDLYSSSSGGFDYWGQG

SEQ ID NO: 6276 - DNA, 129 bp, Artificial Sequence
  Description of Artificial Sequence: Synthetic antibody
agagacaacgccaagaactccctgtatctgcaaatgaacagtctgagagctgaggacacggccttgtattactgtgcaaaagacctgtatagcagcagctcagggggctttgactactggggccaggga

SEQ ID NO: 6277 - protein, 14 aa, Artificial Sequence
  Description of Artificial Sequence: Synthetic antibody
CAKSIAVAACFDYW

SEQ ID NO: 6278 - DNA, 129 bp, Artificial Sequence
  Description of Artificial Sequence: Synthetic antibody
atctccatatataattccaagaacacgctgtatctgcaaatgaacagcctgagagccgaggacacggccgtatattactgtgcgaagagtatagcagtggctgcctgctttgactactggggccaggga

SEQ ID NO: 6279 - protein, 43 aa, Artificial Sequence
  Description of Artificial Sequence: Synthetic antibody
ISIYNSKNTLYLQMNSLRAEDTAVYYCAKSIAVAACFDYWGQG

SEQ ID NO: 6280 - DNA, 129 bp, Artificial Sequence
  Description of Artificial Sequence: Synthetic antibody
atctccagagataattccaagaacacgctgtatctgcaaatgaacagcctgagagccgaggacacggccgtatattactgtgcgaagagtatagcagtggctgcctgctttgactactggggccaggga

SEQ ID NO: 6281 - protein, 43 aa, Artificial Sequence
  Description of Artificial Sequence: Synthetic antibody
ISRDNSKNTLYLQMNSLRAEDTAVYYCAKSIAVAACFDYWGQG

SEQ ID NO: 6282 - protein, 15 aa, Artificial Sequence
  Description of Artificial Sequence: Synthetic antibody
CARAGWYDEGGFDYW

SEQ ID NO: 6283 - DNA, 129 bp, Artificial Sequence
  Description of Artificial Sequence: Synthetic antibody
accagggacacatccgcgagcacagcctacatggagctgagcagcctgagatctgaagacacggctgtgtattactgtgcgagggcgggctggtacgacgagggaggttttgactactggggccaggga

SEQ ID NO: 6284 - protein, 43 aa, Artificial Sequence
  Description of Artificial Sequence: Synthetic antibody
TRDTSASTAYMELSSLRSEDTAVYYCARAGWYDEGGFDYWGQG

SEQ ID NO: 6285 - DNA, 129 bp, Artificial Sequence
  Description of Artificial Sequence: Synthetic antibody
accagggacacatccgcgagcacagcctacatggagctgagcagcctgagatctgaagacacgactgtgtattactgtgcgagggcgggctggtacgacgagggaggttttgactactggggccaggga

SEQ ID NO: 6286 - protein, 43 aa, Artificial Sequence
  Description of Artificial Sequence: Synthetic antibody
TRDTSASTAYMELSSLRSEDTTVYYCARAGWYDEGGFDYWGQG

SEQ ID NO: 6287 - protein, 17 aa, Artificial Sequence
  Description of Artificial Sequence: Synthetic antibody
CARADSRKDVSYGMDVW

SEQ ID NO: 6288 - DNA, 129 bp, Artificial Sequence
  Description of Artificial Sequence: Synthetic antibody
aacacctccataagcacagcctacatggagctgagcagcctgagatctgaggacacggccgtgtattactgtgcgagggccgactcccgaaaagacgtctcctacggtatggacgtctggggccaaggg

SEQ ID NO: 6289 - protein, 43 aa, Artificial Sequence
  Description of Artificial Sequence: Synthetic antibody
NTSISTAYMELSSLRSEDTAVYYCARADSRKDVSYGMDVWGQG

SEQ ID NO: 6290 - protein, 20 aa, Artificial Sequence
  Description of Artificial Sequence: Synthetic antibody
CAKDIAVAGTDLYYYGMDVW

SEQ ID NO: 6291 - DNA, 129 bp, Artificial Sequence
  Description of Artificial Sequence: Synthetic antibody
aaaaactccctgtatctgcaaatgaacagtctgagaactgaggacaccgccttgtattactgtgcaaaagatatagcagtggctggtacggatttgtactactacggtatggacgtctggggccaaggg

SEQ ID NO: 6292 - protein, 43 aa, Artificial Sequence
  Description of Artificial Sequence: Synthetic antibody
KNSLYLQMNSLRTEDTALYYCAKDIAVAGTDLYYYGMDVWGQG

SEQ ID NO: 6293 - DNA, 129 bp, Artificial Sequence
  Description of Artificial Sequence: Synthetic antibody
aaaactccctgtttctgcaaatgcaacagtctgagaactgaggacaccgccttgtattactgtgcaaaagatatagcagtggctggtacggatttgtactactacggtatggacgtctggggccaaggg

SEQ ID NO: 6294 - protein, 43 aa, Artificial Sequence
  Description of Artificial Sequence: Synthetic antibody
KTPCFCKCNSLRTEDTALYYCAKDIAVAGTDLYYYGMDVWGQG

SEQ ID NO: 6295 - protein, 22 aa, Artificial Sequence
  Description of Artificial Sequence: Synthetic antibody
CARGNRIAAAGIRSYYYGMDVW

SEQ ID NO: 6296 - DNA, 129 bp, Artificial Sequence
  Description of Artificial Sequence: Synthetic antibody
acagcctacatggagctgagcagcctgagatctgaggacacggccgtgtattactgtgcgagaggcaaccgtatagcagcagctggtattcgatcctactactacggtatggacgtctggggccaaggg

SEQ ID NO: 6297 - protein, 43 aa, Artificial Sequence
  Description of Artificial Sequence: Synthetic antibody
TAYMELSSLRSEDTAVYYCARGNRIAAAGIRSYYYGMDVWGQG

SEQ ID NO: 6298 - DNA, 129 bp, Artificial Sequence
  Description of Artificial Sequence: Synthetic antibody
aaagcctacatggtgctgagcagcctgagatctgaggacacggccgtgtattactgtgcgagaggcaaccgtatagcagcagctggtattcgatcctactactacggtatggacgtctggggccaaggg

SEQ ID NO: 6299 - protein, 43 aa, Artificial Sequence
  Description of Artificial Sequence: Synthetic antibody
KAYMVLSSLRSEDTAVYYCARGNRIAAAGIRSYYYGMDVWGQG

SEQ ID NO: 6300 - protein, 11 aa, Artificial Sequence
  Description of Artificial Sequence: Synthetic antibody
CARGANEFHFW

SEQ ID NO: 6301 - DNA, 129 bp, Artificial Sequence
  Description of Artificial Sequence: Synthetic antibody
cgattcaccttctccagagacgacgccaagaactccctgtatctgcaaatgaacagtctgagagccgaggacacggccttgtattactgtgcgaggggggcaaacgaattccatttctggggccaaggg

SEQ ID NO: 6302 - protein, 43 aa, Artificial Sequence
  Description of Artificial Sequence: Synthetic antibody
RFTFSRDDAKNSLYLQMNSLRAEDTALYYCARGANEFHFWGQG

SEQ ID NO: 6303 - DNA, 129 bp, Artificial Sequence
  Description of Artificial Sequence: Synthetic antibody
cgattcaccatctccagagacaacgccaagaactccctgtatctgcaaatgaacagtctgagagccgaggacacggccttgtattactgtgcgaggggggcaaacgaattccatttctggggccaaggg

SEQ ID NO: 6304 - protein, 43 aa, Artificial Sequence
  Description of Artificial Sequence: Synthetic antibody
RFTISRDNAKNSLYLQMNSLRAEDTALYYCARGANEFHFWGQG

SEQ ID NO: 6305 - protein, 27 aa, Artificial Sequence
  Description of Artificial Sequence: Synthetic antibody
CAKLSLSYSETMVRVHGYYYYYGMDVW

SEQ ID NO: 6306 - DNA, 129 bp, Artificial Sequence
  Description of Artificial Sequence: Synthetic antibody
ttcaacagcctgagagccgaggacacggccgtatattactgtgcgaaactatccctgtcgtattcggagactatggttcgggtccatgggtactactactactacggtatggacgtctggggccaaggg

SEQ ID NO: 6307 - protein, 43 aa, Artificial Sequence
  Description of Artificial Sequence: Synthetic antibody
FNSLRAEDTAVYYCAKLSLSYSETMVRVHGYYYYYGMDVWGQG

SEQ ID NO: 6308 - DNA, 129 bp, Artificial Sequence
  Description of Artificial Sequence: Synthetic antibody
atgaacagcctgagagccgaggacacggccgtatattactgtgcgaaactatccctgtcgtattcggagactatggttcgggtccatgggtactactactactacggtatggacgtctggggccaaggg

SEQ ID NO: 6309 - protein, 43 aa, Artificial Sequence
  Description of Artificial Sequence: Synthetic antibody
MNSLRAEDTAVYYCAKLSLSYSETMVRVHGYYYYYGMDVWGQG

SEQ ID NO: 6310 - protein, 19 aa, Artificial Sequence
  Description of Artificial Sequence: Synthetic antibody
CARAAKRQQLFPRNYFDYW

SEQ ID NO: 6311 - DNA, 129 bp, Artificial Sequence
  Description of Artificial Sequence: Synthetic antibody
tccacgagcacagtctacatggagctgagtagcctgagatctgaggacacggccgtgtattactgtgcgagagcagctaagaggcagcagctgtttccccgaaactactttgactactggggccaggga

SEQ ID NO: 6312 - protein, 43 aa, Artificial Sequence
  Description of Artificial Sequence: Synthetic antibody
STSTVYMELSSLRSEDTAVYYCARAAKRQQLFPRNYFDYWGQG

SEQ ID NO: 6313 - DNA, 129 bp, Artificial Sequence
  Description of Artificial Sequence: Synthetic antibody
tccacgagcacagtctacatggagctgagcagcctgagatctgaggacacggccgtgtattactgtgcgagagcagctaagaggcagcagctgtttccccgaaactactttgactactggggccaggga

SEQ ID NO: 6314 - protein, 22 aa, Artificial Sequence
  Description of Artificial Sequence: Synthetic antibody
CAKGSGIAVAGTTVGNWYFDLW

SEQ ID NO: 6315 - DNA, 129 bp, Artificial Sequence
  Description of Artificial Sequence: Synthetic antibody
tcgatgtatctgcaaatgaacagcctgagagccgaggacacggccgtatattactgtgcgaaggggtcgggtatagcagtggctggtaccacagttgggaactggtacttcgatctctggggccgtggc

SEQ ID NO: 6316 - protein, 43 aa, Artificial Sequence
  Description of Artificial Sequence: Synthetic antibody
SMYLQMNSLRAEDTAVYYCAKGSGIAVAGTTVGNWYFDLWGRG

SEQ ID NO: 6317 - DNA, 129 bp, Artificial Sequence
  Description of Artificial Sequence: Synthetic antibody
acgctgtatctgcaaatgaacagcctgagagccgaggacacggccgtatattactgtgcgaaggggtcgggtatagcagtggctggtaccacagttgggaactggtacttcgatctctggggccgtggc

SEQ ID NO: 6318 - protein, 43 aa, Artificial Sequence
  Description of Artificial Sequence: Synthetic antibody
TLYLQMNSLRAEDTAVYYCAKGSGIAVAGTTVGNWYFDLWGRG

SEQ ID NO: 6319 - protein, 14 aa, Artificial Sequence
  Description of Artificial Sequence: Synthetic antibody
CAKDTYSRGWLDYW

SEQ ID NO: 6320 - DNA, 129 bp, Artificial Sequence
  Description of Artificial Sequence: Synthetic antibody
atctccagagacaacgccaagaactccctgtatctgcaaatgaacagtctgagaggtgaggacacggccttgtattactgtgcaaaagatacctatagtcgtggctggctggactactggggccaggga

SEQ ID NO: 6321 - protein, 43 aa, Artificial Sequence
  Description of Artificial Sequence: Synthetic antibody
ISRDNAKNSLYLQMNSLRGEDTALYYCAKDTYSRGWLDYWGQG

SEQ ID NO: 6322 - DNA, 129 bp, Artificial Sequence
  Description of Artificial Sequence: Synthetic antibody
acctccagagacaacgccaagaactccctgtatctgcaaatgaacagtctgggaggtgaggacacggccttgtattactgtgcaaaagatacctatagtcgtggctggctggactactggggccaggga

SEQ ID NO: 6323 - protein, 43 aa, Artificial Sequence
  Description of Artificial Sequence: Synthetic antibody
TSRDNAKNSLYLQMNSLGGEDTALYYCAKDTYSRGWLDYWGQG

SEQ ID NO: 6324 - protein, 15 aa, Artificial Sequence
  Description of Artificial Sequence: Synthetic antibody
CARNNFYDRSGYHYW

SEQ ID NO: 6325 - DNA, 129 bp, Artificial Sequence
  Description of Artificial Sequence: Synthetic antibody
tccgtggacacgtccaagaaccaattctccctgaagctgagctctgtgaccgccgcggacacggctctttattactgtgcgaggaacaatttctatgacaggagtggttatcactactggggccaggga

SEQ ID NO: 6326 - protein, 43 aa, Artificial Sequence
  Description of Artificial Sequence: Synthetic antibody
SVDTSKNQFSLKLSSVTAADTALYYCARNNFYDRSGYHYWGQG

SEQ ID NO: 6327 - DNA, 129 bp, Artificial Sequence
  Description of Artificial Sequence: Synthetic antibody
tccgtagacacgtccaagaaccaattctccctgaagctgagctctgtgaccgccgcggacacggctgtatattactgtgcgaggaacaatttctatgataggagtggttatcactactggggccaggga

SEQ ID NO: 6328 - protein, 43 aa, Artificial Sequence
  Description of Artificial Sequence: Synthetic antibody
SVDTSKNQFSLKLSSVTAADTAVYYCARNNFYDRSGYHYWGQG

SEQ ID NO: 6329 - protein, 20 aa, Artificial Sequence
  Description of Artificial Sequence: Synthetic antibody
CARDLTPLGELRTENAFDIW

SEQ ID NO: 6330 - DNA, 129 bp, Artificial Sequence
  Description of Artificial Sequence: Synthetic antibody
acgagcacagtctacatggagctgagcagcctgagatctgaggacacggccgtgtattactgtgcgagagatctcacccctttgggggagctacggaccgaaaatgcttttgatatctggggccaaggg

SEQ ID NO: 6331 - protein, 43 aa, Artificial Sequence
  Description of Artificial Sequence: Synthetic antibody
TSTVYMELSSLRSEDTAVYYCARDLTPLGELRTENAFDIWGQG

SEQ ID NO: 6332 - DNA, 129 bp, Artificial Sequence
  Description of Artificial Sequence: Synthetic antibody
acgagcacagtctacatggagctaagcagcctgagatctgaggacacggccgtgtattactgtgcgagagatctcacccctttgggggagctacggaccgaaaatgcttttgatatctggggccaaggg

SEQ ID NO: 6333 - protein, 17 aa, Artificial Sequence
  Description of Artificial Sequence: Synthetic antibody
CAHSTYYYGSGALFDYW

SEQ ID NO: 6334 - DNA, 129 bp, Artificial Sequence
  Description of Artificial Sequence: Synthetic antibody
gacacctccaaaaaccaggtggtccttacaatgaccaacatggaccctgtggacacagccacatattactgtgcacacagcacgtattactatggttcgggggccctatttgactactggggccaggga

SEQ ID NO: 6335 - protein, 43 aa, Artificial Sequence
  Description of Artificial Sequence: Synthetic antibody
DTSKNQVVLTMTNMDPVDTATYYCAHSTYYYGSGALFDYWGQG

SEQ ID NO: 6336 - DNA, 129 bp, Artificial Sequence
  Description of Artificial Sequence: Synthetic antibody
ggacacctccaaaaccaggtggtccttacaatgaccaacatggaccctgtggacacagccacatattactgtgcacacagcacgtattactatggttcgggggccctatttgactactggggccaggga

SEQ ID NO: 6337 - protein, 43 aa, Artificial Sequence
  Description of Artificial Sequence: Synthetic antibody
GHLQNQVVLTMTNMDPVDTATYYCAHSTYYYGSGALFDYWGQG

SEQ ID NO: 6338 - protein, 21 aa, Artificial Sequence
  Description of Artificial Sequence: Synthetic antibody
CARAYYDILTGYSNFPYFDYW

SEQ ID NO: 6339 - DNA, 129 bp, Artificial Sequence
  Description of Artificial Sequence: Synthetic antibody
tgcacagcctacttggagctgagcagcctgagatctgaagacacggctgtgtattactgtgcgagggcgtattacgatatcttgactggttattccaatttcccatactttgactactggggccaggga

SEQ ID NO: 6340 - protein, 43 aa, Artificial Sequence
  Description of Artificial Sequence: Synthetic antibody
CTAYLELSSLRSEDTAVYYCARAYYDILTGYSNFPYFDYWGQG

SEQ ID NO: 6341 - DNA, 129 bp, Artificial Sequence
  Description of Artificial Sequence: Synthetic antibody
agcacagcctacatggagctgagcagcctgagatctgaagacacggctgtgtattactgtgcgagggcgtattacgatatcttgactggttattccaatttcccatactttgactactggggccaggga

SEQ ID NO: 6342 - protein, 43 aa, Artificial Sequence
  Description of Artificial Sequence: Synthetic antibody
STAYMELSSLRSEDTAVYYCARAYYDILTGYSNFPYFDYWGQG

SEQ ID NO: 6343 - protein, 11 aa, Artificial Sequence
  Description of Artificial Sequence: Synthetic antibody
CATKPGWFDPW

SEQ ID NO: 6344 - DNA, 129 bp, Artificial Sequence
  Description of Artificial Sequence: Synthetic antibody
cgagtcaccatatcagtagacacgtccaagaaccagttctccctgaagctgagctctgtgaccgccgcggacacggctgtgtattactgtgcgactaaaccagggtggttcgacccctggggccaggga

SEQ ID NO: 6345 - protein, 43 aa, Artificial Sequence
  Description of Artificial Sequence: Synthetic antibody
RVTISVDTSKNQFSLKLSSVTAADTAVYYCATKPGWFDPWGQG

SEQ ID NO: 6346 - DNA, 129 bp, Artificial Sequence
  Description of Artificial Sequence: Synthetic antibody
cgagtcaccatatcagtagacacgtccaagaaccagttctccctgaagctgagctctgtgaccgccgcggacacggctgcgtattactgtgcgactaaaccagggtggttcgacccctggggccaggga

SEQ ID NO: 6347 - protein, 43 aa, Artificial Sequence
  Description of Artificial Sequence: Synthetic antibody
RVTISVDTSKNQFSLKLSSVTAADTAAYYCATKPGWFDPWGQG

SEQ ID NO: 6348 - protein, 24 aa, Artificial Sequence
  Description of Artificial Sequence: Synthetic antibody
CARGSRVMVQGVIIPSYYYGMDVW

SEQ ID NO: 6349 - DNA, 129 bp, Artificial Sequence
  Description of Artificial Sequence: Synthetic antibody
tatcttcaaatgaacagcctgagagccgaggacacggccgtgtattactgtgcgagagggagcagggttatggttcagggagttattatcccttcctactactacggtatggacgtctggggccaaggg

SEQ ID NO: 6350 - protein, 43 aa, Artificial Sequence
  Description of Artificial Sequence: Synthetic antibody
YLQMNSLRAEDTAVYYCARGSRVMVQGVIIPSYYYGMDVWGQG

SEQ ID NO: 6351 - DNA, 129 bp, Artificial Sequence
  Description of Artificial Sequence: Synthetic antibody
tatattcaaatcaacagcctgagagccgaggacacggccgtgtattactgtgcgagagggagcagggttatggttcagggagttattatcccttcctactactacggtatggacgtctggggccaaggg

SEQ ID NO: 6352 - protein, 43 aa, Artificial Sequence
  Description of Artificial Sequence: Synthetic antibody
YIQINSLRAEDTAVYYCARGSRVMVQGVIIPSYYYGMDVWGQG

SEQ ID NO: 6353 - protein, 17 aa, Artificial Sequence
  Description of Artificial Sequence: Synthetic antibody
CAKDAYGSGESPRFDYW

SEQ ID NO: 6354 - DNA, 129 bp, Artificial Sequence
  Description of Artificial Sequence: Synthetic antibody
agacaacgccaagaactcctgtatctgcaaatgaacagtctgagagctgaggacacggccttgtattactgtgcaaaagacgcatatggttcgggggagtccccgcgatttgactactggggccaggga

SEQ ID NO: 6355 - protein, 43 aa, Artificial Sequence
  Description of Artificial Sequence: Synthetic antibody
RQRQELLYLQMNSLRAEDTALYYCAKDAYGSGESPRFDYWGQG

SEQ ID NO: 6356 - DNA, 129 bp, Artificial Sequence
  Description of Artificial Sequence: Synthetic antibody
gacaacgccaagaactccctgtatctgcaaatgaacagtctgagagctgaggacacggccttgtattactgtgcaaaagacgcatatggttcgggggagtccccgcgatttgactactggggccaggga

SEQ ID NO: 6357 - protein, 43 aa, Artificial Sequence
  Description of Artificial Sequence: Synthetic antibody
DNAKNSLYLQMNSLRAEDTALYYCAKDAYGSGESPRFDYWGQG

SEQ ID NO: 6358 - protein, 16 aa, Artificial Sequence
  Description of Artificial Sequence: Synthetic antibody
CARAPPEYSGYGCDYW

SEQ ID NO: 6359 - DNA, 129 bp, Artificial Sequence
  Description of Artificial Sequence: Synthetic antibody
tgggacacgtccacgagcacagtctacatggaactgagcagcctgagatctgaggacacggccgtatatttctgtgcgagagcccctcccgaatatagtggctacggttgtgactactggggccaggga

SEQ ID NO: 6360 - protein, 43 aa, Artificial Sequence
  Description of Artificial Sequence: Synthetic antibody
WDTSTSTVYMELSSLRSEDTAVYFCARAPPEYSGYGCDYWGQG

SEQ ID NO: 6361 - DNA, 129 bp, Artificial Sequence
  Description of Artificial Sequence: Synthetic antibody
agggacacgtccacgagcacagtctacatggaactgagcagcctgagatctgaggacacggccgtatatttctgtgcgagagcccctcccgaatatagtggctacggttgtgactactggggccaggga

SEQ ID NO: 6362 - protein, 43 aa, Artificial Sequence
  Description of Artificial Sequence: Synthetic antibody
RDTSTSTVYMELSSLRSEDTAVYFCARAPPEYSGYGCDYWGQG

SEQ ID NO: 6363 - protein, 26 aa, Artificial Sequence
  Description of Artificial Sequence: Synthetic antibody
CARPSHGYMVRGVIIPPSIWYYFDYW

SEQ ID NO: 6364 - DNA, 129 bp, Artificial Sequence
  Description of Artificial Sequence: Synthetic antibody
gagctgaggagcctgagatctgacgacacggccgtgtattactgtgcgagaccctcccatggatatatggttcggggagttattatccccccctcgatctggtactactttgactactggggccaggga

SEQ ID NO: 6365 - protein, 43 aa, Artificial Sequence
  Description of Artificial Sequence: Synthetic antibody
ELRSLRSDDTAVYYCARPSHGYMVRGVIIPPSIWYYFDYWGQG

SEQ ID NO: 6366 - DNA, 129 bp, Artificial Sequence
  Description of Artificial Sequence: Synthetic antibody
gagatgaggtgcctgtgttctgacgacacggccgtgtattactgtgcgagaccctcccatggatatatggttcggggagttattatccccccctcgatctggtactactttgactactggggccaggga

SEQ ID NO: 6367 - protein, 43 aa, Artificial Sequence
  Description of Artificial Sequence: Synthetic antibody
EMRCLCSDDTAVYYCARPSHGYMVRGVIIPPSIWYYFDYWGQG

SEQ ID NO: 6368 - protein, 22 aa, Artificial Sequence
  Description of Artificial Sequence: Synthetic antibody
CAKDMGGSYYPPRYYYYGMDVW

SEQ ID NO: 6369 - DNA, 129 bp, Artificial Sequence
  Description of Artificial Sequence: Synthetic antibody
tccctgtatctgcaaatgaacagtctgagagctgaggacacggccttgtattactgtgcaaaagatatgggtgggagctactaccctccccgctactactactacggtatggacgtctggggccaaggg

SEQ ID NO: 6370 - protein, 43 aa, Artificial Sequence
  Description of Artificial Sequence: Synthetic antibody
SLYLQMNSLRAEDTALYYCAKDMGGSYYPPRYYYYGMDVWGQG

SEQ ID NO: 6371 - DNA, 129 bp, Artificial Sequence
  Description of Artificial Sequence: Synthetic antibody
tacatgtatctgcaaatgaacagtctgagagctgaggacacggccttgtattactgtgcaaaagatatgggtgggagctactaccctccccgctactactactacggtatggacgtctggggccaaggg

SEQ ID NO: 6372 - protein, 43 aa, Artificial Sequence
  Description of Artificial Sequence: Synthetic antibody
YMYLQMNSLRAEDTALYYCAKDMGGSYYPPRYYYYGMDVWGQG

SEQ ID NO: 6373 - protein, 20 aa, Artificial Sequence
  Description of Artificial Sequence: Synthetic antibody
CAKDYCGGDCYLSFWYFDLW

SEQ ID NO: 6374 - DNA, 129 bp, Artificial Sequence
  Description of Artificial Sequence: Synthetic antibody
caagaactccctgtatctgcaatgaacagtctgagagctgaggacacggccttgtattactgtgcaaaagattattgtggtggtgactgctatttatcattctggtacttcgatctctggggccgtggc

SEQ ID NO: 6375 - protein, 43 aa, Artificial Sequence
  Description of Artificial Sequence: Synthetic antibody
QELPVSAMNSLRAEDTALYYCAKDYCGGDCYLSFWYFDLWGRG

SEQ ID NO: 6376 - DNA, 129 bp, Artificial Sequence
  Description of Artificial Sequence: Synthetic antibody
aagaactccctgtatctgcaaatgaacagtctgagagctgaggacacggccttgtattactgtgcaaaagattattgtggtggtgactgctatttatcattctggtacttcgatctctggggccgtggc

SEQ ID NO: 6377 - protein, 43 aa, Artificial Sequence
  Description of Artificial Sequence: Synthetic antibody
KNSLYLQMNSLRAEDTALYYCAKDYCGGDCYLSFWYFDLWGRG

SEQ ID NO: 6378 - protein, 18 aa, Artificial Sequence
  Description of Artificial Sequence: Synthetic antibody
CAKVGVAGTGDFWYFDLW

SEQ ID NO: 6379 - DNA, 129 bp, Artificial Sequence
  Description of Artificial Sequence: Synthetic antibody
tgttccgagaacacgctgtttctgcaaatgaacagcctgagagtcgaggacacggccgtatattactgtgcgaaagtaggcgtggctggcactggggacttctggtacttcgatctctggggccgtggc

SEQ ID NO: 6380 - protein, 43 aa, Artificial Sequence
  Description of Artificial Sequence: Synthetic antibody
CSENTLFLQMNSLRVEDTAVYYCAKVGVAGTGDFWYFDLWGRG

SEQ ID NO: 6381 - DNA, 129 bp, Artificial Sequence
  Description of Artificial Sequence: Synthetic antibody
agttccgagaacacgctgtttctgcaaatgaacagcctgagagtcgaggacacggccgtatattactgtgcgaaagtaggcgtggctggcactggggacttctggtacttcgatctctggggccgtggc

SEQ ID NO: 6382 - protein, 43 aa, Artificial Sequence
  Description of Artificial Sequence: Synthetic antibody
SSENTLFLQMNSLRVEDTAVYYCAKVGVAGTGDFWYFDLWGRG

SEQ ID NO: 6383 - protein, 15 aa, Artificial Sequence
  Description of Artificial Sequence: Synthetic antibody
CARWGMQQQLGLDYW

SEQ ID NO: 6384 - DNA, 129 bp, Artificial Sequence
  Description of Artificial Sequence: Synthetic antibody
accagggactcgtccttcagcacagcctacatggagctgagcaggctgagatctgacgacacggccgtgtattactgtgcgagatggggaatgcagcagcagctgggacttgactactggggccaggga

SEQ ID NO: 6385 - protein, 43 aa, Artificial Sequence
  Description of Artificial Sequence: Synthetic antibody
TRDSSFSTAYMELSRLRSDDTAVYYCARWGMQQQLGLDYWGQG

SEQ ID NO: 6386 - DNA, 129 bp, Artificial Sequence
  Description of Artificial Sequence: Synthetic antibody
accagggacacgtccatcagcacagcctacatggagctgagcaggctgagatctgacgacacggccgtgtattactgtgcgagatggggaatgcagcagcagctgggacttgactactggggccaggga

SEQ ID NO: 6387 - protein, 43 aa, Artificial Sequence
  Description of Artificial Sequence: Synthetic antibody
TRDTSISTAYMELSRLRSDDTAVYYCARWGMQQQLGLDYWGQG

SEQ ID NO: 6388 - protein, 18 aa, Artificial Sequence
  Description of Artificial Sequence: Synthetic antibody
CARKVASSGFGELFFDYW

SEQ ID NO: 6389 - DNA, 129 bp, Artificial Sequence
  Description of Artificial Sequence: Synthetic antibody
aattccaaggacacgctgtatctgcaaatgaacagcctgagagccgaggacacggccgtatattactgtgcgagaaaagtcgcctcttcggggttcggggagttattttttgactactggggccaggga

SEQ ID NO: 6390 - protein, 43 aa, Artificial Sequence
  Description of Artificial Sequence: Synthetic antibody
NSKDTLYLQMNSLRAEDTAVYYCARKVASSGFGELFFDYWGQG

SEQ ID NO: 6391 - DNA, 129 bp, Artificial Sequence
  Description of Artificial Sequence: Synthetic antibody
aattccaagaacacgctgtatctgcaaatgaacagcctgagagccgaggacacggccgtatattactgtgcgagaaaagtcgcctcttcggggttcggggagttattttttgactactggggccaggga

SEQ ID NO: 6392 - protein, 43 aa, Artificial Sequence
  Description of Artificial Sequence: Synthetic antibody
NSKNTLYLQMNSLRAEDTAVYYCARKVASSGFGELFFDYWGQG

SEQ ID NO: 6393 - protein, 18 aa, Artificial Sequence
  Description of Artificial Sequence: Synthetic antibody
CARGFWIATAGINWFDPW

SEQ ID NO: 6394 - DNA, 129 bp, Artificial Sequence
  Description of Artificial Sequence: Synthetic antibody
acgtccaagaaccagttctccctgaagctgagctctgtgaccgccgcggacacggccgtgtatcactgtgcgagaggtttttggatagcaacagctggtatcaattggttcgacccctggggccaggga

SEQ ID NO: 6395 - protein, 43 aa, Artificial Sequence
  Description of Artificial Sequence: Synthetic antibody
TSKNQFSLKLSSVTAADTAVYHCARGFWIATAGINWFDPWGQG

SEQ ID NO: 6396 - DNA, 129 bp, Artificial Sequence
  Description of Artificial Sequence: Synthetic antibody
acgtccaagaaccagttctccctgaagccgagctctgtgaccgccgcggacacggccgtgtatcactgtgcgagaggtttttggatagcaacagctggtatcaattggttcgacccctggggccaggga

SEQ ID NO: 6397 - protein, 43 aa, Artificial Sequence
  Description of Artificial Sequence: Synthetic antibody
TSKNQFSLKPSSVTAADTAVYHCARGFWIATAGINWFDPWGQG

SEQ ID NO: 6398 - protein, 18 aa, Artificial Sequence
  Description of Artificial Sequence: Synthetic antibody
CASTKFYCTGGVCSLDYW

SEQ ID NO: 6399 - DNA, 129 bp, Artificial Sequence
  Description of Artificial Sequence: Synthetic antibody
acatccacgagcacagcctacatggaactgaagggcctgagatctgacgactcggccgtctattattgtgcaagtaccaagttctattgtactggtggtgtatgctcccttgactactggggccaggga

SEQ ID NO: 6400 - protein, 43 aa, Artificial Sequence
  Description of Artificial Sequence: Synthetic antibody
TSTSTAYMELKGLRSDDSAVYYCASTKFYCTGGVCSLDYWGQG

SEQ ID NO: 6401 - DNA, 129 bp, Artificial Sequence
  Description of Artificial Sequence: Synthetic antibody
acatccacgagcacaacctacatggaactgatgagcctgagatctgacgactcggccgtgtattactgtgcaagtaccaagttctattgtactggtggtgtttgctcccttgactactggggccaggga

SEQ ID NO: 6402 - protein, 43 aa, Artificial Sequence
  Description of Artificial Sequence: Synthetic antibody
TSTSTTYMELMSLRSDDSAVYYCASTKFYCTGGVCSLDYWGQG

SEQ ID NO: 6403 - protein, 13 aa, Artificial Sequence
  Description of Artificial Sequence: Synthetic antibody
CARENSGYEFDYW

SEQ ID NO: 6404 - DNA, 129 bp, Artificial Sequence
  Description of Artificial Sequence: Synthetic antibody
accatctccagggacaacgccaagaactcactgtatctgcaaatgaacagcctgagagccgaggacacggccgtgtattactgtgcgagagaaaatagtggctacgagtttgactactggggccaggga

SEQ ID NO: 6405 - protein, 43 aa, Artificial Sequence
  Description of Artificial Sequence: Synthetic antibody
TISRDNAKNSLYLQMNSLRAEDTAVYYCARENSGYEFDYWGQG

SEQ ID NO: 6406 - DNA, 129 bp, Artificial Sequence
  Description of Artificial Sequence: Synthetic antibody
accatctccaggcacaaccccaagaactcactgtatctgcaaatgaacagcctgagagccgaggacacggccgtgtattactgtgcgagagaaaatagtggctacgagtttgactactggggccaggga

SEQ ID NO: 6407 - protein, 43 aa, Artificial Sequence
  Description of Artificial Sequence: Synthetic antibody
TISRHNPKNSLYLQMNSLRAEDTAVYYCARENSGYEFDYWGQG

SEQ ID NO: 6408 - protein, 10 aa, Artificial Sequence
  Description of Artificial Sequence: Synthetic antibody
CAKSRGVDYW

SEQ ID NO: 6409 - DNA, 129 bp, Artificial Sequence
  Description of Artificial Sequence: Synthetic antibody
ggccggttcaccatctccagagacaattccaagaacacgctgtatctgcaaatgaacagcctgagagccgaggacacggccgtatattactgtgcgaaaagccggggtgttgactactggggccaggga

SEQ ID NO: 6410 - protein, 43 aa, Artificial Sequence
  Description of Artificial Sequence: Synthetic antibody
GRFTISRDNSKNTLYLQMNSLRAEDTAVYYCAKSRGVDYWGQG

SEQ ID NO: 6411 - DNA, 129 bp, Artificial Sequence
  Description of Artificial Sequence: Synthetic antibody
ggcaggttcaccatctccagacacaattccaagaactcgctgtatctgcaaattaacagcctgagagccgaggacacggccgtatattactgtgcgaaaagccggggtgttgactactggggccaggga

SEQ ID NO: 6412 - protein, 43 aa, Artificial Sequence
  Description of Artificial Sequence: Synthetic antibody
GRFTISRHNSKNSLYLQINSLRAEDTAVYYCAKSRGVDYWGQG

SEQ ID NO: 6413 - protein, 16 aa, Artificial Sequence
  Description of Artificial Sequence: Synthetic antibody
CARDSGYSNYPYFDYW

SEQ ID NO: 6414 - DNA, 129 bp, Artificial Sequence
  Description of Artificial Sequence: Synthetic antibody
tgggacaacgccaacaactcactgtatctgcaaatgaacagcctgagagccgaggacacggccgtgtattactgtgcgagagattccggatacagtaactacccctactttgactactggggccaggga

SEQ ID NO: 6415 - protein, 43 aa, Artificial Sequence
  Description of Artificial Sequence: Synthetic antibody
WDNANNSLYLQMNSLRAEDTAVYYCARDSGYSNYPYFDYWGQG

SEQ ID NO: 6416 - DNA, 129 bp, Artificial Sequence
  Description of Artificial Sequence: Synthetic antibody
agggacaacgccaagaactcactgtatctgcaaatgaacagcctgagagccgaggacacggccgtgtattactgtgcgagagattccggatacagtaactacccctactttgactactggggccaggga

SEQ ID NO: 6417 - protein, 43 aa, Artificial Sequence
  Description of Artificial Sequence: Synthetic antibody
RDNAKNSLYLQMNSLRAEDTAVYYCARDSGYSNYPYFDYWGQG

SEQ ID NO: 6418 - protein, 19 aa, Artificial Sequence
  Description of Artificial Sequence: Synthetic antibody
CARPGGRIVGALWGAFDYW

SEQ ID NO: 6419 - DNA, 129 bp, Artificial Sequence
  Description of Artificial Sequence: Synthetic antibody
tccatcagcgccgcctacctgcagtggagcagcctgaaggcctcggacaccgccatgtattactgcgcgagacccggcggtaggatagtgggagctctctggggggcttttgactactggggccaggga

SEQ ID NO: 6420 - protein, 43 aa, Artificial Sequence
  Description of Artificial Sequence: Synthetic antibody
SISAAYLQWSSLKASDTAMYYCARPGGRIVGALWGAFDYWGQG

SEQ ID NO: 6421 - DNA, 129 bp, Artificial Sequence
  Description of Artificial Sequence: Synthetic antibody
tccatcagcaccgcctacctgcagtggagcagcctgaaggcctcggacaccgccatgtattactgtgcgagacccggcggtaggatagtgggagctctctggggggcttttgactactggggccaggga

SEQ ID NO: 6422 - protein, 43 aa, Artificial Sequence
  Description of Artificial Sequence: Synthetic antibody
SISTAYLQWSSLKASDTAMYYCARPGGRIVGALWGAFDYWGQG

SEQ ID NO: 6423 - protein, 18 aa, Artificial Sequence
  Description of Artificial Sequence: Synthetic antibody
CAREVYSGGWHVGVGDYW

SEQ ID NO: 6424 - DNA, 129 bp, Artificial Sequence
  Description of Artificial Sequence: Synthetic antibody
accgctgtcggcacggcatatctgcagatcagcagcctaaaggctgaggacactgccgtgtattattgtgcgagagaagtgtatagcggtggctggcacgtgggggtcggggactactggggccaggga

SEQ ID NO: 6425 - protein, 43 aa, Artificial Sequence
  Description of Artificial Sequence: Synthetic antibody
TAVGTAYLQISSLKAEDTAVYYCAREVYSGGWHVGVGDYWGQG

SEQ ID NO: 6426 - DNA, 129 bp, Artificial Sequence
  Description of Artificial Sequence: Synthetic antibody
accgctgtcggcacggcatatctgcagatcagcagcctaaaggctgaggacactgccatgtattattgtgcgagagaagtgtatagcggtggctggcacgtgggggtcggggactactggggccagggg

SEQ ID NO: 6427 - protein, 43 aa, Artificial Sequence
  Description of Artificial Sequence: Synthetic antibody
TAVGTAYLQISSLKAEDTAMYYCAREVYSGGWHVGVGDYWGQG

SEQ ID NO: 6428 - protein, 21 aa, Artificial Sequence
  Description of Artificial Sequence: Synthetic antibody
CARDRRFLEWLKANYYGMDVW

SEQ ID NO: 6429 - DNA, 129 bp, Artificial Sequence
  Description of Artificial Sequence: Synthetic antibody
tgcacagcctacttggagctgaggagcctgagatctgacgacacggccgtgtattactgtgcgagagatcggcgatttttggagtggttaaaagcgaactactacggtatggacgtctggggccaaggg

SEQ ID NO: 6430 - protein, 43 aa, Artificial Sequence
  Description of Artificial Sequence: Synthetic antibody
CTAYLELRSLRSDDTAVYYCARDRRFLEWLKANYYGMDVWGQG

SEQ ID NO: 6431 - DNA, 129 bp, Artificial Sequence
  Description of Artificial Sequence: Synthetic antibody
agcacagcctacatggagctgaggagcctgagatctgacgacacggccgtgtattactgtgcgagagatcggcgatttttggagtggttaaaagcgaactactacggtatggacgtctggggccaaggg

SEQ ID NO: 6432 - protein, 43 aa, Artificial Sequence
  Description of Artificial Sequence: Synthetic antibody
STAYMELRSLRSDDTAVYYCARDRRFLEWLKANYYGMDVWGQG

SEQ ID NO: 6433 - protein, 14 aa, Artificial Sequence
  Description of Artificial Sequence: Synthetic antibody
CARGPEWLHYLDYW

SEQ ID NO: 6434 - DNA, 129 bp, Artificial Sequence
  Description of Artificial Sequence: Synthetic antibody
ttatcaatagacaggcccaagaaccagttctccctgaacctgagctctgtgaccgctgcggacacggccgtgtattactgtgcgagaggcccggagtggcttcattacttggactactggggccaggga

SEQ ID NO: 6435 - protein, 43 aa, Artificial Sequence
  Description of Artificial Sequence: Synthetic antibody
LSIDRPKNQFSLNLSSVTAADTAVYYCARGPEWLHYLDYWGQG

SEQ ID NO: 6436 - DNA, 129 bp, Artificial Sequence
  Description of Artificial Sequence: Synthetic antibody
atatcaatagacaggtccaagaaccagttctccctgaacctgagctctgtgaccgctgcggacacggccgtgtattactgtgcgagaggcccggagtggcttcattacttggactactggggccaggga

SEQ ID NO: 6437 - protein, 43 aa, Artificial Sequence
  Description of Artificial Sequence: Synthetic antibody
ISIDRSKNQFSLNLSSVTAADTAVYYCARGPEWLHYLDYWGQG

SEQ ID NO: 6438 - protein, 22 aa, Artificial Sequence
  Description of Artificial Sequence: Synthetic antibody
CARGSSDEATYYYGPDDAFDIW

SEQ ID NO: 6439 - DNA, 129 bp, Artificial Sequence
  Description of Artificial Sequence: Synthetic antibody
acagcctacttggagctgagcagcctgagatctgaggacacggccgtgtattactgtgcgagaggatcatccgacgaagcgacgtattactatggtcccgatgatgcttttgatatctggggccaaggg

SEQ ID NO: 6440 - protein, 43 aa, Artificial Sequence
  Description of Artificial Sequence: Synthetic antibody
TAYLELSSLRSEDTAVYYCARGSSDEATYYYGPDDAFDIWGQG

SEQ ID NO: 6441 - DNA, 129 bp, Artificial Sequence
  Description of Artificial Sequence: Synthetic antibody
acagcctacatggagctgagcagcctgagatctgaggacacggccgtgtattactgtgcgagaggatcatccgacgaagcgacgtattactatggtcccgatgatgcttttgatatctggggccaaggg

SEQ ID NO: 6442 - protein, 43 aa, Artificial Sequence
  Description of Artificial Sequence: Synthetic antibody
TAYMELSSLRSEDTAVYYCARGSSDEATYYYGPDDAFDIWGQG

SEQ ID NO: 6443 - protein, 13 aa, Artificial Sequence
  Description of Artificial Sequence: Synthetic antibody
CARDRTGLGLDIW

SEQ ID NO: 6444 - DNA, 129 bp, Artificial Sequence
  Description of Artificial Sequence: Synthetic antibody
accacttccgtagacaggtccaagaaccagttctccctgaaggtgaactctgtgaccgccgcagacacggccgtgtattactgtgcgagagacaggactggtttagggcttgatatctggggccaaggg

SEQ ID NO: 6445 - protein, 43 aa, Artificial Sequence
  Description of Artificial Sequence: Synthetic antibody
TTSVDRSKNQFSLKVNSVTAADTAVYYCARDRTGLGLDIWGQG

SEQ ID NO: 6446 - DNA, 129 bp, Artificial Sequence
  Description of Artificial Sequence: Synthetic antibody
accacatccgtagacaggtccaagaacctgttctccctgaaggtgaactctgtgaccgccgcagacacggccgtgtattactgtgcgagagacaggactggtttagggcttgatatctggggccaaggg

SEQ ID NO: 6447 - protein, 43 aa, Artificial Sequence
  Description of Artificial Sequence: Synthetic antibody
TTSVDRSKNLFSLKVNSVTAADTAVYYCARDRTGLGLDIWGQG

SEQ ID NO: 6448 - protein, 9 aa, Artificial Sequence
  Description of Artificial Sequence: Synthetic antibody
CARDGWACW

SEQ ID NO: 6449 - DNA, 129 bp, Artificial Sequence
  Description of Artificial Sequence: Synthetic antibody
aaaagtctaataagcatcaacgcagacacatccaagaaccagttctccctgcacttaaactttgtgactcccgaggacacggctgtgtattactgtgcaagagatggctgggcctgctggggccaggga

SEQ ID NO: 6450 - protein, 43 aa, Artificial Sequence
  Description of Artificial Sequence: Synthetic antibody
KSLISINADTSKNQFSLHLNFVTPEDTAVYYCARDGWACWGQG

SEQ ID NO: 6451 - DNA, 129 bp, Artificial Sequence
  Description of Artificial Sequence: Synthetic antibody
aaaagtcgaataagcatcaacgcagacacatccaagaaccagttctccctgcacttgaactttgtgactcccgaggacacggctgtgtattactgtgcaagagatggctgggcctgctggggccaggga

SEQ ID NO: 6452 - protein, 43 aa, Artificial Sequence
  Description of Artificial Sequence: Synthetic antibody
KSRISINADTSKNQFSLHLNFVTPEDTAVYYCARDGWACWGQG

SEQ ID NO: 6453 - protein, 16 aa, Artificial Sequence
  Description of Artificial Sequence: Synthetic antibody
CARAMSIAARRGVGYW

SEQ ID NO: 6454 - DNA, 129 bp, Artificial Sequence
  Description of Artificial Sequence: Synthetic antibody
tgggacacgtccacgagcacagtctacatggagctgagcagcctgagatctgaggacacggccgtgtattactgtgcgagagctatgagtatagcagctcggcggggcgttgggtactggggccaggga

SEQ ID NO: 6455 - protein, 43 aa, Artificial Sequence
  Description of Artificial Sequence: Synthetic antibody
WDTSTSTVYMELSSLRSEDTAVYYCARAMSIAARRGVGYWGQG

SEQ ID NO: 6456 - DNA, 129 bp, Artificial Sequence
  Description of Artificial Sequence: Synthetic antibody
agggacacgtccacgagcacagtctacatggagctgagcagcctgagatctgaggacacggccgtgtattactgtgcgagagctatgagtatagcagctcggcggggcgttgggtactggggccaggga

SEQ ID NO: 6457 - protein, 43 aa, Artificial Sequence
  Description of Artificial Sequence: Synthetic antibody
RDTSTSTVYMELSSLRSEDTAVYYCARAMSIAARRGVGYWGQG

SEQ ID NO: 6458 - protein, 11 aa, Artificial Sequence
  Description of Artificial Sequence: Synthetic antibody
CAHYHGDYDTW

SEQ ID NO: 6459 - DNA, 129 bp, Artificial Sequence
  Description of Artificial Sequence: Synthetic antibody
caggctcaccatcaccaaggacacctccaaaaccaggtggtccttacaatgaccaacatggaccctgtggacacagccacatattactgtgcacactaccacggtgactacgacacctggggccaggga

SEQ ID NO: 6460 - protein, 43 aa, Artificial Sequence
  Description of Artificial Sequence: Synthetic antibody
QAHHHQGHLQNQVVLTMTNMDPVDTATYYCAHYHGDYDTWGQG

SEQ ID NO: 6461 - DNA, 129 bp, Artificial Sequence
  Description of Artificial Sequence: Synthetic antibody
aggctcaccatcaccaaggacacctccaaaaaccaggtggtccttacaatgaccaacatggaccctgtggacacagccacatattactgtgcacactaccacggtgactacgacacctggggccaggga

SEQ ID NO: 6462 - protein, 43 aa, Artificial Sequence
  Description of Artificial Sequence: Synthetic antibody
RLTITKDTSKNQVVLTMTNMDPVDTATYYCAHYHGDYDTWGQG

SEQ ID NO: 6463 - protein, 14 aa, Artificial Sequence
  Description of Artificial Sequence: Synthetic antibody
CARGDSSSWFVDYW

SEQ ID NO: 6464 - DNA, 129 bp, Artificial Sequence
  Description of Artificial Sequence: Synthetic antibody
ttgaccagggacacgtccacgagcacagtctacatggagctgagcagcctgagatctgaggacacggccgtgtattactgtgcgagaggggacagcagcagctggtttgtggactactggggccaggga

SEQ ID NO: 6465 - protein, 43 aa, Artificial Sequence
  Description of Artificial Sequence: Synthetic antibody
LTRDTSTSTVYMELSSLRSEDTAVYYCARGDSSSWFVDYWGQG

SEQ ID NO: 6466 - DNA, 129 bp, Artificial Sequence
  Description of Artificial Sequence: Synthetic antibody
atgaccagggacacgtccacgagcacagtctacatggagctgagcagcctgagatctgaggacacggccgtgtattactgtgcgagaggggacagcagcagctggtttgtggactactggggccaggga

SEQ ID NO: 6467 - protein, 43 aa, Artificial Sequence
  Description of Artificial Sequence: Synthetic antibody
MTRDTSTSTVYMELSSLRSEDTAVYYCARGDSSSWFVDYWGQG

SEQ ID NO: 6468 - protein, 22 aa, Artificial Sequence
  Description of Artificial Sequence: Synthetic antibody
CAHRRNLDYFDGSGRYNYFGPW

SEQ ID NO: 6469 - DNA, 129 bp, Artificial Sequence
  Description of Artificial Sequence: Synthetic antibody
caggtggtcctaacaatgaccaacgtggaccctgtggacacagccacctattactgtgcacacagacgtaatctggattactttgatggtagtggtcgctacaactacttcggcccctggggccaggga

SEQ ID NO: 6470 - protein, 43 aa, Artificial Sequence
  Description of Artificial Sequence: Synthetic antibody
QVVLTMTNVDPVDTATYYCAHRRNLDYFDGSGRYNYFGPWGQG

SEQ ID NO: 6471 - DNA, 129 bp, Artificial Sequence
  Description of Artificial Sequence: Synthetic antibody
ccaggtggtcctacaatgaccaacgtggaccctgtggacacagccacctattactgtgcacacagacgtaatctggattactttgatggtagtggtcgctacaactacttcggcccctggggccaggga

SEQ ID NO: 6472 - protein, 43 aa, Artificial Sequence
  Description of Artificial Sequence: Synthetic antibody
PGGPTMTNVDPVDTATYYCAHRRNLDYFDGSGRYNYFGPWGQG

SEQ ID NO: 6473 - protein, 13 aa, Artificial Sequence
  Description of Artificial Sequence: Synthetic antibody
CTTEGSGWYLFYW

SEQ ID NO: 6474 - DNA, 129 bp, Artificial Sequence
  Description of Artificial Sequence: Synthetic antibody
accatctcaagagatgattcaaaagacacgctgtatctgcaaatgaacagcctgaaaaccgaggacacagccgtgtattattgtaccacagagggcagtggctggtatttgttctactggggccaggga

SEQ ID NO: 6475 - protein, 43 aa, Artificial Sequence
  Description of Artificial Sequence: Synthetic antibody
TISRDDSKDTLYLQMNSLKTEDTAVYYCTTEGSGWYLFYWGQG

SEQ ID NO: 6476 - DNA, 129 bp, Artificial Sequence
  Description of Artificial Sequence: Synthetic antibody
accatctcaagagatgattcaaaaaacacgctgtatctgcaaatgaacagcctgaaaaccgaggacacagccgtgtattattgtaccacagagggcagtggctggtatttgttctactggggccaggga

SEQ ID NO: 6477 - protein, 43 aa, Artificial Sequence
  Description of Artificial Sequence: Synthetic antibody
TISRDDSKNTLYLQMNSLKTEDTAVYYCTTEGSGWYLFYWGQG

SEQ ID NO: 6478 - protein, 16 aa, Artificial Sequence
  Description of Artificial Sequence: Synthetic antibody
CARRKVGGGYWYFDLW

SEQ ID NO: 6479 - DNA, 129 bp, Artificial Sequence
  Description of Artificial Sequence: Synthetic antibody
tgggacaacgccaagaactcactgtatctgcaaatgaacagcctgagagccgaggacacggccgtgtattactgtgcgagacggaaggttggcgggggttactggtacttcgatctctggggccgtggc

SEQ ID NO: 6480 - protein, 43 aa, Artificial Sequence
  Description of Artificial Sequence: Synthetic antibody
WDNAKNSLYLQMNSLRAEDTAVYYCARRKVGGGYWYFDLWGRG

SEQ ID NO: 6481 - DNA, 129 bp, Artificial Sequence
  Description of Artificial Sequence: Synthetic antibody
agggacaacgccaagaactcactgtatctgcaaatgaacagcctgagagccgaggacacggccgtgtattactgtgcgagacggaaggttggcgggggttactggtacttcgatctctggggccgtggc

SEQ ID NO: 6482 - protein, 43 aa, Artificial Sequence
  Description of Artificial Sequence: Synthetic antibody
RDNAKNSLYLQMNSLRAEDTAVYYCARRKVGGGYWYFDLWGRG

SEQ ID NO: 6483 - protein, 17 aa, Artificial Sequence
  Description of Artificial Sequence: Synthetic antibody
CAHRQGAAAVVGWFDPW

SEQ ID NO: 6484 - DNA, 129 bp, Artificial Sequence
  Description of Artificial Sequence: Synthetic antibody
gacacctccaaaaaccaggtggtccttacaatgaccaacatggaccctgtggacacagccacatattactgtgcacacagacaaggagcagcagctgttgttggctggttcgacccctggggccaggga

SEQ ID NO: 6485 - protein, 43 aa, Artificial Sequence
  Description of Artificial Sequence: Synthetic antibody
DTSKNQVVLTMTNMDPVDTATYYCAHRQGAAAVVGWFDPWGQG

SEQ ID NO: 6486 - DNA, 129 bp, Artificial Sequence
  Description of Artificial Sequence: Synthetic antibody
ggacacctccaaaaccaggtggtccttacaatgaccaacatggaccctgtggacacagccacatattactgtgcacacagacaaggagcagcagctgttgttggctggttcgacccctggggccaggga

SEQ ID NO: 6487 - protein, 43 aa, Artificial Sequence
  Description of Artificial Sequence: Synthetic antibody
GHLQNQVVLTMTNMDPVDTATYYCAHRQGAAAVVGWFDPWGQG

SEQ ID NO: 6488 - protein, 21 aa, Artificial Sequence
  Description of Artificial Sequence: Synthetic antibody
CARGHQSGYNYYYYYYGMDVW

SEQ ID NO: 6489 - DNA, 129 bp, Artificial Sequence
  Description of Artificial Sequence: Synthetic antibody
aaccagttctccctgaagctgagctttgtgaccgccgcggacacggctgtgtattactgtgcgagagggcatcaaagtggctacaactactactactactactacggtatggacgtctggggccaaggg

SEQ ID NO: 6490 - protein, 43 aa, Artificial Sequence
  Description of Artificial Sequence: Synthetic antibody
NQFSLKLSFVTAADTAVYYCARGHQSGYNYYYYYYGMDVWGQG

SEQ ID NO: 6491 - DNA, 129 bp, Artificial Sequence
  Description of Artificial Sequence: Synthetic antibody
aaccagttctccctgaagctgagctctgtgaccgccgcggacacggctgtgtattactgtgcgagagggcatcaaagtggctacaactactactactactactacggtatggacgtctggggccaaggg

SEQ ID NO: 6492 - protein, 43 aa, Artificial Sequence
  Description of Artificial Sequence: Synthetic antibody
NQFSLKLSSVTAADTAVYYCARGHQSGYNYYYYYYGMDVWGQG

SEQ ID NO: 6493 - protein, 20 aa, Artificial Sequence
  Description of Artificial Sequence: Synthetic antibody
CARLRYCSSITSCSYYCDYW

SEQ ID NO: 6494 - DNA, 129 bp, Artificial Sequence
  Description of Artificial Sequence: Synthetic antibody
atcagcaccgcctacctgcagtggagcagcctgaaggccttggacaccgccatgtattactgtgcgagactcagatattgtagtagtattactagctgctcctactactgtgactactggggccaggga

SEQ ID NO: 6495 - protein, 43 aa, Artificial Sequence
  Description of Artificial Sequence: Synthetic antibody
ISTAYLQWSSLKALDTAMYYCARLRYCSSITSCSYYCDYWGQG

SEQ ID NO: 6496 - DNA, 129 bp, Artificial Sequence
  Description of Artificial Sequence: Synthetic antibody
atcagcaccgcctacctgcagtggagcagcctgaaggcctcggacaccgccatgtattactgtgcgagactcagatattgtagtagtattactagctgctcctactactgtgactactggggccaggga

SEQ ID NO: 6497 - protein, 43 aa, Artificial Sequence
  Description of Artificial Sequence: Synthetic antibody
ISTAYLQWSSLKASDTAMYYCARLRYCSSITSCSYYCDYWGQG

SEQ ID NO: 6498 - protein, 24 aa, Artificial Sequence
  Description of Artificial Sequence: Synthetic antibody
CAADSPKGSITGTRWYYYYGMDVW

SEQ ID NO: 6499 - DNA, 129 bp, Artificial Sequence
  Description of Artificial Sequence: Synthetic antibody
tacttggagctgagctgcctgagatccgaggacacggccgtgtattactgtgcggcagattcaccaaaggggagtataactggaactcggtggtactactactacggtatggacgtctggggccaaggg

SEQ ID NO: 6500 - protein, 43 aa, Artificial Sequence
  Description of Artificial Sequence: Synthetic antibody
YLELSCLRSEDTAVYYCAADSPKGSITGTRWYYYYGMDVWGQG

SEQ ID NO: 6501 - DNA, 129 bp, Artificial Sequence
  Description of Artificial Sequence: Synthetic antibody
tacatggagctgagcagcctgagatccgaggacacggccgtgtattactgtgcggcagattcaccaaaggggagtataactggaactcggtggtactactactacggtatggacgtctggggccaaggg

SEQ ID NO: 6502 - protein, 43 aa, Artificial Sequence
  Description of Artificial Sequence: Synthetic antibody
YMELSSLRSEDTAVYYCAADSPKGSITGTRWYYYYGMDVWGQG

SEQ ID NO: 6503 - protein, 13 aa, Artificial Sequence
  Description of Artificial Sequence: Synthetic antibody
CAKDRWIAAAGDW

SEQ ID NO: 6504 - DNA, 129 bp, Artificial Sequence
  Description of Artificial Sequence: Synthetic antibody
accatctccagagacaattccaagaacaccctgtatctgcaaatgaacagcctgagagccgaggacacggccctatattactgtgcgaaagatagatggatagcggcagctggtgactggggccaggga

SEQ ID NO: 6505 - protein, 43 aa, Artificial Sequence
  Description of Artificial Sequence: Synthetic antibody
TISRDNSKNTLYLQMNSLRAEDTALYYCAKDRWIAAAGDWGQG

SEQ ID NO: 6506 - DNA, 129 bp, Artificial Sequence
  Description of Artificial Sequence: Synthetic antibody
accatctccagagacaattccaagaacaccctgtatccgcaaatgaacagcctgagagccgaggacacggccctatattactgtgcgaaagatagatggatagcggcagctggtgactggggccaggga

SEQ ID NO: 6507 - protein, 43 aa, Artificial Sequence
  Description of Artificial Sequence: Synthetic antibody
TISRDNSKNTLYPQMNSLRAEDTALYYCAKDRWIAAAGDWGQG

SEQ ID NO: 6508 - protein, 15 aa, Artificial Sequence
  Description of Artificial Sequence: Synthetic antibody
CARVIAAAGNPFDYW

SEQ ID NO: 6509 - DNA, 129 bp, Artificial Sequence
  Description of Artificial Sequence: Synthetic antibody
accacagacacatccacgaccacagcctacatggagttgaggagcctgagatctgacgacacggccgtgtattactgtgcgagagtcatagcagcagctggcaatccctttgactactggggccaggga

SEQ ID NO: 6510 - protein, 43 aa, Artificial Sequence
  Description of Artificial Sequence: Synthetic antibody
TTDTSTTTAYMELRSLRSDDTAVYYCARVIAAAGNPFDYWGQG

SEQ ID NO: 6511 - DNA, 129 bp, Artificial Sequence
  Description of Artificial Sequence: Synthetic antibody
accacacacacatccacgaccacagcctacatggagttgaggagcctgagatctgacgacacggccgtgtattactgtgcgagagtcatagcagcagctggcaatccctttgactactggggccaggga

SEQ ID NO: 6512 - protein, 43 aa, Artificial Sequence
  Description of Artificial Sequence: Synthetic antibody
TTHTSTTTAYMELRSLRSDDTAVYYCARVIAAAGNPFDYWGQG

SEQ ID NO: 6513 - protein, 14 aa, Artificial Sequence
  Description of Artificial Sequence: Synthetic antibody
CAGSSGWRWYFDYW

SEQ ID NO: 6514 - DNA, 129 bp, Artificial Sequence
  Description of Artificial Sequence: Synthetic antibody
atctccagagacaacgccaagaactccctgtatctgcaaatgaacagtctgagagctgaggacacggccttgtattactgtgcgggtagtagtggttggaggtggtactttgactactggggccaggga

SEQ ID NO: 6515 - protein, 43 aa, Artificial Sequence
  Description of Artificial Sequence: Synthetic antibody
ISRDNAKNSLYLQMNSLRAEDTALYYCAGSSGWRWYFDYWGQG

SEQ ID NO: 6516 - DNA, 129 bp, Artificial Sequence
  Description of Artificial Sequence: Synthetic antibody
atctccagagacaacgccaagaactccctgtatctgcaaatgaacagtctgagagctgaggacacggccttgtattactgtgcgggcagtagtggttggaggtggtactttgactactggggccaggga

SEQ ID NO: 6517 - protein, 18 aa, Artificial Sequence
  Description of Artificial Sequence: Synthetic antibody
CARGNDWYSSSWYLLDYW

SEQ ID NO: 6518 - DNA, 129 bp, Artificial Sequence
  Description of Artificial Sequence: Synthetic antibody
tcgtctaagaacctgttctccctgaagctgagctctgtgactgccgcggacacggccgtgtattactgtgcgagaggaaacgactggtatagcagcagctggtacttgcttgactactggggccaggga

SEQ ID NO: 6519 - protein, 43 aa, Artificial Sequence
  Description of Artificial Sequence: Synthetic antibody
SSKNLFSLKLSSVTAADTAVYYCARGNDWYSSSWYLLDYWGQG

SEQ ID NO: 6520 - DNA, 129 bp, Artificial Sequence
  Description of Artificial Sequence: Synthetic antibody
acgtctaagaaccagttctccctgaagctgagctctgtgactgccgcggacacggccgtgtattactgtgcgagaggaaacgactggtatagcagcagctggtacttgcttgactactggggccaggga

SEQ ID NO: 6521 - protein, 43 aa, Artificial Sequence
  Description of Artificial Sequence: Synthetic antibody
TSKNQFSLKLSSVTAADTAVYYCARGNDWYSSSWYLLDYWGQG

SEQ ID NO: 6522 - protein, 29 aa, Artificial Sequence
  Description of Artificial Sequence: Synthetic antibody
CAKDLREESEYDYVWGSYRAYYYYGMDVW

SEQ ID NO: 6523 - DNA, 129 bp, Artificial Sequence
  Description of Artificial Sequence: Synthetic antibody
tgcctgagagccgaggacacggccgtatattactgtgcgaaagatctacgtgaagagtccgaatatgattacgtttgggggagttatcgtgcttactactactacggtatggacgtctggggccaaggg

SEQ ID NO: 6524 - protein, 43 aa, Artificial Sequence
  Description of Artificial Sequence: Synthetic antibody
CLRAEDTAVYYCAKDLREESEYDYVWGSYRAYYYYGMDVWGQG

SEQ ID NO: 6525 - DNA, 129 bp, Artificial Sequence
  Description of Artificial Sequence: Synthetic antibody
agcctgagagccgaggacacggccgtatattactgtgcgaaagatctacgtgaagagtccgaatatgattacgtttgggggagttatcgtgcttactactactacggtatggacgtctggggccaaggg

SEQ ID NO: 6526 - protein, 43 aa, Artificial Sequence
  Description of Artificial Sequence: Synthetic antibody
SLRAEDTAVYYCAKDLREESEYDYVWGSYRAYYYYGMDVWGQG

SEQ ID NO: 6527 - protein, 16 aa, Artificial Sequence
  Description of Artificial Sequence: Synthetic antibody
CAKLWGGGYYHAFDIW

SEQ ID NO: 6528 - DNA, 129 bp, Artificial Sequence
  Description of Artificial Sequence: Synthetic antibody
atatataattccaagaacacactgtatctgcaaatgaacagtctgagagccgaggacacggccgtatattattgtgcgaaactgtggggtgggggctattaccatgcttttgatatctggggccaaggg

SEQ ID NO: 6529 - protein, 43 aa, Artificial Sequence
  Description of Artificial Sequence: Synthetic antibody
IYNSKNTLYLQMNSLRAEDTAVYYCAKLWGGGYYHAFDIWGQG

SEQ ID NO: 6530 - DNA, 129 bp, Artificial Sequence
  Description of Artificial Sequence: Synthetic antibody
agagataattccaagaacacactgtatctgcaaatgaacagtctgagagccgaggacacggccgtatattattgtgcgaaactgtggggtgggggctattaccatgcttttgatatctggggccaaggg

SEQ ID NO: 6531 - protein, 43 aa, Artificial Sequence
  Description of Artificial Sequence: Synthetic antibody
RDNSKNTLYLQMNSLRAEDTAVYYCAKLWGGGYYHAFDIWGQG

SEQ ID NO: 6532 - protein, 15 aa, Artificial Sequence
  Description of Artificial Sequence: Synthetic antibody
CARGGGSYYSDFDYW

SEQ ID NO: 6533 - DNA, 129 bp, Artificial Sequence
  Description of Artificial Sequence: Synthetic antibody
tcagttgacacgtctaagaaccagttctccctgaagctgagctctgtgactgccgcggacacggccgtgtattactgtgcgagaggaggagggagttattattcggactttgactactggggccaggga

SEQ ID NO: 6534 - protein, 43 aa, Artificial Sequence
  Description of Artificial Sequence: Synthetic antibody
SVDTSKNQFSLKLSSVTAADTAVYYCARGGGSYYSDFDYWGQG

SEQ ID NO: 6535 - DNA, 129 bp, Artificial Sequence
  Description of Artificial Sequence: Synthetic antibody
tatgttgacacgtctaagaaccagttctccctgaagctgagctctgtgactgccgcggacacggccgtgtattactgtgcgagaggaggagggagttattattcggactttgactactggggccaggga

SEQ ID NO: 6536 - protein, 43 aa, Artificial Sequence
  Description of Artificial Sequence: Synthetic antibody
YVDTSKNQFSLKLSSVTAADTAVYYCARGGGSYYSDFDYWGQG

SEQ ID NO: 6537 - protein, 25 aa, Artificial Sequence
  Description of Artificial Sequence: Synthetic antibody
CARLLIPMYYYGSGSYYNHNWFDPW

SEQ ID NO: 6538 - DNA, 129 bp, Artificial Sequence
  Description of Artificial Sequence: Synthetic antibody
ttggagctgagcaggctgagatctgacgacacggccgtgtattactgtgcgaggctcctgataccgatgtattactatggttcggggagttattataaccacaactggttcgacccctggggccaggga

SEQ ID NO: 6539 - protein, 43 aa, Artificial Sequence
  Description of Artificial Sequence: Synthetic antibody
LELSRLRSDDTAVYYCARLLIPMYYYGSGSYYNHNWFDPWGQG

SEQ ID NO: 6540 - DNA, 129 bp, Artificial Sequence
  Description of Artificial Sequence: Synthetic antibody
atggagctgagcaggctgagatctgacgacacggccgtgtattactgtgcgaggctcctgataccgatgtattactatggttcggggagttattataaccacaactggttcgacccctggggccaggga

SEQ ID NO: 6541 - protein, 43 aa, Artificial Sequence
  Description of Artificial Sequence: Synthetic antibody
MELSRLRSDDTAVYYCARLLIPMYYYGSGSYYNHNWFDPWGQG

SEQ ID NO: 6542 - protein, 19 aa, Artificial Sequence
  Description of Artificial Sequence: Synthetic antibody
CARVGIVVLITGVCYFDYW

SEQ ID NO: 6543 - DNA, 129 bp, Artificial Sequence
  Description of Artificial Sequence: Synthetic antibody
tccaagagcacgctgtatcttcaaatgaacagcctgagagccgaggacacggccgtgtattactgtgcgagagttggaatagtagtgcttattacgggggtatgctactttgactactggggccaggga

SEQ ID NO: 6544 - protein, 43 aa, Artificial Sequence
  Description of Artificial Sequence: Synthetic antibody
SKSTLYLQMNSLRAEDTAVYYCARVGIVVLITGVCYFDYWGQG

SEQ ID NO: 6545 - DNA, 129 bp, Artificial Sequence
  Description of Artificial Sequence: Synthetic antibody
tccaagaacacgctgtatcttcaaatgaacagcctgagagccgaggacacggccgtgtattactgtgcgagagttggaatagtagtgcttattacgggggtatgctactttgactactggggccaggga

SEQ ID NO: 6546 - protein, 43 aa, Artificial Sequence
  Description of Artificial Sequence: Synthetic antibody
SKNTLYLQMNSLRAEDTAVYYCARVGIVVLITGVCYFDYWGQG

SEQ ID NO: 6547 - protein, 16 aa, Artificial Sequence
  Description of Artificial Sequence: Synthetic antibody
CARAEIVGATDHFDYW

SEQ ID NO: 6548 - DNA, 129 bp, Artificial Sequence
  Description of Artificial Sequence: Synthetic antibody
tgggacacatccgcgagcacagcctacatggagctgagcagcctgagatctgaagacacggctgtgtattactgtgcgagagctgagatagtgggagctaccgatcactttgactactggggccaggga

SEQ ID NO: 6549 - protein, 43 aa, Artificial Sequence
  Description of Artificial Sequence: Synthetic antibody
WDTSASTAYMELSSLRSEDTAVYYCARAEIVGATDHFDYWGQG

SEQ ID NO: 6550 - DNA, 129 bp, Artificial Sequence
  Description of Artificial Sequence: Synthetic antibody
agggacacatccgcgagcacagcctacatggagctgagcagcctgagatctgaagacacggctgtgtattactgtgcgagagctgagatagtgggagctaccgatcactttgactactggggccaggga

SEQ ID NO: 6551 - protein, 43 aa, Artificial Sequence
  Description of Artificial Sequence: Synthetic antibody
RDTSASTAYMELSSLRSEDTAVYYCARAEIVGATDHFDYWGQG

SEQ ID NO: 6552 - protein, 23 aa, Artificial Sequence
  Description of Artificial Sequence: Synthetic antibody
CAKVVGGGDCSGGSCYGWYFDLW

SEQ ID NO: 6553 - DNA, 129 bp, Artificial Sequence
  Description of Artificial Sequence: Synthetic antibody
ctgtatctgcaaatgagcagtctgagagctgaggacacggccttgtattactgtgcaaaagttgtgggcggaggagattgtagtggtggtagctgctacggttggtacttcgatctctggggccgtggc

SEQ ID NO: 6554 - protein, 43 aa, Artificial Sequence
  Description of Artificial Sequence: Synthetic antibody
LYLQMSSLRAEDTALYYCAKVVGGGDCSGGSCYGWYFDLWGRG

SEQ ID NO: 6555 - DNA, 129 bp, Artificial Sequence
  Description of Artificial Sequence: Synthetic antibody
ctgtatctgcaaatgaacagtctgagagctgaggacacggccttgtattactgtgcaaaagttgtgggcggaggagattgtagtggtggtagctgctacggttggtacttcgatctctggggccgtggc

SEQ ID NO: 6556 - protein, 43 aa, Artificial Sequence
  Description of Artificial Sequence: Synthetic antibody
LYLQMNSLRAEDTALYYCAKVVGGGDCSGGSCYGWYFDLWGRG

SEQ ID NO: 6557 - protein, 16 aa, Artificial Sequence
  Description of Artificial Sequence: Synthetic antibody
CAHSRGVWELPDFDYW

SEQ ID NO: 6558 - DNA, 129 bp, Artificial Sequence
  Description of Artificial Sequence: Synthetic antibody
caaggacacctccaaaaccaggtggtccttacaatgaccaacatggaccctgtggacacagccacatattactgtgcacacagccggggggtgtgggagctacccgactttgactactggggccaggga

SEQ ID NO: 6559 - protein, 43 aa, Artificial Sequence
  Description of Artificial Sequence: Synthetic antibody
QGHLQNQVVLTMTNMDPVDTATYYCAHSRGVWELPDFDYWGQG

SEQ ID NO: 6560 - DNA, 129 bp, Artificial Sequence
  Description of Artificial Sequence: Synthetic antibody
aaggacacctccaaaaaccaggtggtccttacaatgaccaacatggaccctgtggacacagccacatattactgtgcacacagccggggggtgtgggagctacccgactttgactactggggccaggga

SEQ ID NO: 6561 - protein, 43 aa, Artificial Sequence
  Description of Artificial Sequence: Synthetic antibody
KDTSKNQVVLTMTNMDPVDTATYYCAHSRGVWELPDFDYWGQG

SEQ ID NO: 6562 - protein, 17 aa, Artificial Sequence
  Description of Artificial Sequence: Synthetic antibody
CAKEGPVRGVPTEFDPW

SEQ ID NO: 6563 - DNA, 129 bp, Artificial Sequence
  Description of Artificial Sequence: Synthetic antibody
tataattccaacaacacgctgtatctgcaaatgaacagcctgagagccgaggacacggccgtatattactgtgcgaaagaagggccggttcggggagttccgaccgagttcgacccctggggccaggga

SEQ ID NO: 6564 - protein, 43 aa, Artificial Sequence
  Description of Artificial Sequence: Synthetic antibody
YNSNNTLYLQMNSLRAEDTAVYYCAKEGPVRGVPTEFDPWGQG

SEQ ID NO: 6565 - DNA, 129 bp, Artificial Sequence
  Description of Artificial Sequence: Synthetic antibody
gataattccaagaacacgctgtatctgcaaatgaacagcctgagagccgaggacacggccgtatattactgtgcgaaagaagggccggttcggggagttccgaccgagttcgacccctggggccaggga

SEQ ID NO: 6566 - protein, 43 aa, Artificial Sequence
  Description of Artificial Sequence: Synthetic antibody
DNSKNTLYLQMNSLRAEDTAVYYCAKEGPVRGVPTEFDPWGQG

SEQ ID NO: 6567 - protein, 21 aa, Artificial Sequence
  Description of Artificial Sequence: Synthetic antibody
CARDYYYDSSGQENRLWFDPW

SEQ ID NO: 6568 - DNA, 129 bp, Artificial Sequence
  Description of Artificial Sequence: Synthetic antibody
tgcacagtctacttggagctgagcagcctgagatctgaggacacggccgtgtattactgtgcgagagattactactatgatagtagtggtcaggaaaatcgactgtggttcgacccctggggccaggga

SEQ ID NO: 6569 - protein, 43 aa, Artificial Sequence
  Description of Artificial Sequence: Synthetic antibody
CTVYLELSSLRSEDTAVYYCARDYYYDSSGQENRLWFDPWGQG

SEQ ID NO: 6570 - DNA, 129 bp, Artificial Sequence
  Description of Artificial Sequence: Synthetic antibody
agcacagtctacatggagctgagcagcctgagatctgaggacacggccgtgtattactgtgcgagagattactactatgatagtagtggtcaggaaaatcgactgtggttcgacccctggggccaggga

SEQ ID NO: 6571 - protein, 43 aa, Artificial Sequence
  Description of Artificial Sequence: Synthetic antibody
STVYMELSSLRSEDTAVYYCARDYYYDSSGQENRLWFDPWGQG

SEQ ID NO: 6572 - protein, 13 aa, Artificial Sequence
  Description of Artificial Sequence: Synthetic antibody
CGRHEWLGLFDHW

SEQ ID NO: 6573 - DNA, 129 bp, Artificial Sequence
  Description of Artificial Sequence: Synthetic antibody
tacatatccatagacacgtccaagaatcagttctccctgaagctgagctctgtgaccgccgcagacacggctgtgtattactgtgggagacatgagtggctgggactttttgaccactggggccaggga

SEQ ID NO: 6574 - protein, 43 aa, Artificial Sequence
  Description of Artificial Sequence: Synthetic antibody
YISIDTSKNQFSLKLSSVTAADTAVYYCGRHEWLGLFDHWGQG

SEQ ID NO: 6575 - DNA, 129 bp, Artificial Sequence
  Description of Artificial Sequence: Synthetic antibody
accatatccatagacacgtccaagaatcagttctccctgaagctgagctctgtgaccgccgcagacacggctgtgtattactgtgggagacatgagtggctgggactttttgaccactggggccaggga

SEQ ID NO: 6576 - protein, 43 aa, Artificial Sequence
  Description of Artificial Sequence: Synthetic antibody
TISIDTSKNQFSLKLSSVTAADTAVYYCGRHEWLGLFDHWGQG

SEQ ID NO: 6577 - protein, 15 aa, Artificial Sequence
  Description of Artificial Sequence: Synthetic antibody
CTTVEQWLLRGVEYW

SEQ ID NO: 6578 - DNA, 129 bp, Artificial Sequence
  Description of Artificial Sequence: Synthetic antibody
tcaagagatgattcaaaaaacacactgtatctgcaaatgaacagcctgaaaagtgaggacacagccgtgtattactgtaccactgtagagcagtggctgctaagaggtgtggaatactggggccaggga

SEQ ID NO: 6579 - protein, 43 aa, Artificial Sequence
  Description of Artificial Sequence: Synthetic antibody
SRDDSKNTLYLQMNSLKSEDTAVYYCTTVEQWLLRGVEYWGQG

SEQ ID NO: 6580 - DNA, 129 bp, Artificial Sequence
  Description of Artificial Sequence: Synthetic antibody
tcaagagatgattcaaaaaacacactgtatctgcaaatgaacagcctgaaaagtgaggacacagccgtgcattactgtaccactgtagagcagtggctgctaagaggtgtggaatactggggccaggga

SEQ ID NO: 6581 - protein, 43 aa, Artificial Sequence
  Description of Artificial Sequence: Synthetic antibody
SRDDSKNTLYLQMNSLKSEDTAVHYCTTVEQWLLRGVEYWGQG

SEQ ID NO: 6582 - protein, 18 aa, Artificial Sequence
  Description of Artificial Sequence: Synthetic antibody
CAHSPNEYSSSSGYFDYW

SEQ ID NO: 6583 - DNA, 129 bp, Artificial Sequence
  Description of Artificial Sequence: Synthetic antibody
acctccaaaaaccaggtggtccttacaatgaccaacatggaccctgtggacacagccacatattactgtgcacacagccccaatgagtatagcagctcgtccggctactttgactactggggccaggga

SEQ ID NO: 6584 - protein, 43 aa, Artificial Sequence
  Description of Artificial Sequence: Synthetic antibody
TSKNQVVLTMTNMDPVDTATYYCAHSPNEYSSSSGYFDYWGQG

SEQ ID NO: 6585 - DNA, 129 bp, Artificial Sequence
  Description of Artificial Sequence: Synthetic antibody
cacctccaaaaccaggtggtccttacaatgaccaacatggaccctgtggacacagccacatattactgtgcacacagccccaatgagtatagcagctcgtccggctactttgactactggggccaggga

SEQ ID NO: 6586 - protein, 43 aa, Artificial Sequence
  Description of Artificial Sequence: Synthetic antibody
HLQNQVVLTMTNMDPVDTATYYCAHSPNEYSSSSGYFDYWGQG

SEQ ID NO: 6587 - protein, 23 aa, Artificial Sequence
  Description of Artificial Sequence: Synthetic antibody
CARQFLTKDIVILPAADDAFDIW

SEQ ID NO: 6588 - DNA, 129 bp, Artificial Sequence
  Description of Artificial Sequence: Synthetic antibody
ttctccctgaggctgagctctgtgaccgccgcagacacggctgtgtatttctgtgcgagacagttcttgacgaaggatattgttatactaccagctgccgatgatgcttttgatatctggggccaaggg

SEQ ID NO: 6589 - protein, 43 aa, Artificial Sequence
  Description of Artificial Sequence: Synthetic antibody
FSLRLSSVTAADTAVYFCARQFLTKDIVILPAADDAFDIWGQG

SEQ ID NO: 6590 - DNA, 129 bp, Artificial Sequence
  Description of Artificial Sequence: Synthetic antibody
ttctccctgaggccgagctctgtgaccgccgcagacacggctgtgtatttctgtgcgagacagttcttgacgaaggatattgttatactaccagctgccgatgatgcttttgatatctggggccaaggg

SEQ ID NO: 6591 - protein, 43 aa, Artificial Sequence
  Description of Artificial Sequence: Synthetic antibody
FSLRPSSVTAADTAVYFCARQFLTKDIVILPAADDAFDIWGQG

SEQ ID NO: 6592 - protein, 16 aa, Artificial Sequence
  Description of Artificial Sequence: Synthetic antibody
CAKDFYGDPLYYFDYW

SEQ ID NO: 6593 - DNA, 129 bp, Artificial Sequence
  Description of Artificial Sequence: Synthetic antibody
agagacaacgccaagaactccctgtatctgcaaatgaacagtctgagagctgaggacacggccttgtattactgtgcaaaagatttctacggcgaccccttgtactactttgactactggggccaggga

SEQ ID NO: 6594 - protein, 43 aa, Artificial Sequence
  Description of Artificial Sequence: Synthetic antibody
RDNAKNSLYLQMNSLRAEDTALYYCAKDFYGDPLYYFDYWGQG

SEQ ID NO: 6595 - DNA, 129 bp, Artificial Sequence
  Description of Artificial Sequence: Synthetic antibody
agagacaacgccaagaactccctgtatctgcaaatgaacagcctgagagctgaggacacggccttgtattactgtgcaaaagatttctacggcgaccccttgtactactttgactactggggccaggga

SEQ ID NO: 6596 - protein, 14 aa, Artificial Sequence
  Description of Artificial Sequence: Synthetic antibody
CAKGGYGSGEFDYW

SEQ ID NO: 6597 - DNA, 129 bp, Artificial Sequence
  Description of Artificial Sequence: Synthetic antibody
atctccatagataattccaagaacacgctgtatctgcaaatgaacagcctgagagccgaggacacggccgtatattactgtgcgaaagggggctatggttcgggagagtttgactactggggccaggga

SEQ ID NO: 6598 - protein, 43 aa, Artificial Sequence
  Description of Artificial Sequence: Synthetic antibody
ISIDNSKNTLYLQMNSLRAEDTAVYYCAKGGYGSGEFDYWGQG

SEQ ID NO: 6599 - DNA, 129 bp, Artificial Sequence
  Description of Artificial Sequence: Synthetic antibody
atctccagagataattccaagaacacgctgtatctgcaaatgaacagcctgagagccgaggacacggccgtatattactgtgcgaaagggggctatggttcgggagagtttgactactggggccaggga

SEQ ID NO: 6600 - protein, 43 aa, Artificial Sequence
  Description of Artificial Sequence: Synthetic antibody
ISRDNSKNTLYLQMNSLRAEDTAVYYCAKGGYGSGEFDYWGQG

SEQ ID NO: 6601 - protein, 15 aa, Artificial Sequence
  Description of Artificial Sequence: Synthetic antibody
CASHPNWDSFYFDYW

SEQ ID NO: 6602 - DNA, 129 bp, Artificial Sequence
  Description of Artificial Sequence: Synthetic antibody
tccagagatgaatcaaagaacacggcgtatctgcaaatgaacagcctgaaaaccgaggacacggccgtgtattactgtgctagccaccctaactgggattcgttctactttgactactggggccaggga

SEQ ID NO: 6603 - protein, 43 aa, Artificial Sequence
  Description of Artificial Sequence: Synthetic antibody
SRDESKNTAYLQMNSLKTEDTAVYYCASHPNWDSFYFDYWGQG

SEQ ID NO: 6604 - DNA, 129 bp, Artificial Sequence
  Description of Artificial Sequence: Synthetic antibody
tccagagatcaatcaaacaacacggcgtatctgcaaatgaacagcctgaaaaccgaggacacggccgtgtattactgtgctagccaccctaactgggattcgttctactttgactactggggccaggga

SEQ ID NO: 6605 - protein, 43 aa, Artificial Sequence
  Description of Artificial Sequence: Synthetic antibody
SRDQSNNTAYLQMNSLKTEDTAVYYCASHPNWDSFYFDYWGQG

SEQ ID NO: 6606 - protein, 13 aa, Artificial Sequence
  Description of Artificial Sequence: Synthetic antibody
CAKGLPRDLFDYW

SEQ ID NO: 6607 - DNA, 129 bp, Artificial Sequence
  Description of Artificial Sequence: Synthetic antibody
accatctccagagacaattccaagaacacgctgtatctgcaaatgaacagcctgagagccgaggacacggccgtatattactgtgcgaaggggcttccccgggacctttttgactactggggccaggga

SEQ ID NO: 6608 - protein, 43 aa, Artificial Sequence
  Description of Artificial Sequence: Synthetic antibody
TISRDNSKNTLYLQMNSLRAEDTAVYYCAKGLPRDLFDYWGQG

SEQ ID NO: 6609 - DNA, 129 bp, Artificial Sequence
  Description of Artificial Sequence: Synthetic antibody
accatctccagacacaattccaagaacacgctgtatctgcaaatgaacagcctgagagccgaggacacggccgtatattactgtgcgaaggggcttccccgggacctttttgactactggggccaggga

SEQ ID NO: 6610 - protein, 43 aa, Artificial Sequence
  Description of Artificial Sequence: Synthetic antibody
TISRHNSKNTLYLQMNSLRAEDTAVYYCAKGLPRDLFDYWGQG

SEQ ID NO: 6611 - protein, 22 aa, Artificial Sequence
  Description of Artificial Sequence: Synthetic antibody
CARGPRVVTVGTDYYYYGMDVW

SEQ ID NO: 6612 - DNA, 129 bp, Artificial Sequence
  Description of Artificial Sequence: Synthetic antibody
acgctgtatcttcaaatgaacagcctgagagccgaggacacggccgtgtattactgtgcgagagggcctagggtggtgactgtaggaaccgattactactactacggtatggacgtctggggccaaggg

SEQ ID NO: 6613 - protein, 43 aa, Artificial Sequence
  Description of Artificial Sequence: Synthetic antibody
TLYLQMNSLRAEDTAVYYCARGPRVVTVGTDYYYYGMDVWGQG

SEQ ID NO: 6614 - DNA, 129 bp, Artificial Sequence
  Description of Artificial Sequence: Synthetic antibody
aagatgtatcttcaaatgaacagcctgagagccgaggacacggccgtgtattactgtgcgagagggcctagggtggtgactgtaggaaccgattactactactacggtatggacgtctggggccaaggg

SEQ ID NO: 6615 - protein, 43 aa, Artificial Sequence
  Description of Artificial Sequence: Synthetic antibody
KMYLQMNSLRAEDTAVYYCARGPRVVTVGTDYYYYGMDVWGQG

SEQ ID NO: 6616 - protein, 16 aa, Artificial Sequence
  Description of Artificial Sequence: Synthetic antibody
CAHGVGGWDGQYFDHW

SEQ ID NO: 6617 - DNA, 129 bp, Artificial Sequence
  Description of Artificial Sequence: Synthetic antibody
aaggacacctccgaaaaccaggtggtcctaacaatgaccaacatggaacctgcagacacagccacatactactgtgcacacggtgttggaggctgggatgggcagtactttgaccactggggcccggga

SEQ ID NO: 6618 - protein, 43 aa, Artificial Sequence
  Description of Artificial Sequence: Synthetic antibody
KDTSENQVVLTMTNMEPADTATYYCAHGVGGWDGQYFDHWGPG

SEQ ID NO: 6619 - DNA, 129 bp, Artificial Sequence
  Description of Artificial Sequence: Synthetic antibody
aaggacacctccaaaaaccaggtggtccttacaatgaccgacatggacccactggacacagccacatattactgtgcacacggtgttggaggctgggatggtcagtactttgaccactggggccaggga

SEQ ID NO: 6620 - protein, 43 aa, Artificial Sequence
  Description of Artificial Sequence: Synthetic antibody
KDTSKNQVVLTMTDMDPLDTATYYCAHGVGGWDGQYFDHWGQG

SEQ ID NO: 6621 - protein, 17 aa, Artificial Sequence
  Description of Artificial Sequence: Synthetic antibody
CTRVYDYGDYSVGLDYW

SEQ ID NO: 6622 - DNA, 129 bp, Artificial Sequence
  Description of Artificial Sequence: Synthetic antibody
gttgattcaaagaacacggcgtatctgcaaatgaacagcctgaaaaccgaggacacggccgtgtattactgtactagagtgtatgactacggtgactactcggttggtttggactactggggccaggga

SEQ ID NO: 6623 - protein, 43 aa, Artificial Sequence
  Description of Artificial Sequence: Synthetic antibody
VDSKNTAYLQMNSLKTEDTAVYYCTRVYDYGDYSVGLDYWGQG

SEQ ID NO: 6624 - DNA, 129 bp, Artificial Sequence
  Description of Artificial Sequence: Synthetic antibody
gatgattcaaagaacacggcgtatctgcaaatgaacagcctgaaaaccgaggacacggccgtgtattactgtactagagtgtatgactacggtgactactcggttggtttggactactggggccaggga

SEQ ID NO: 6625 - protein, 43 aa, Artificial Sequence
  Description of Artificial Sequence: Synthetic antibody
DDSKNTAYLQMNSLKTEDTAVYYCTRVYDYGDYSVGLDYWGQG

SEQ ID NO: 6626 - protein, 29 aa, Artificial Sequence
  Description of Artificial Sequence: Synthetic antibody
CARAEGSSITIFGVVTRALAGYYYGMDVW

SEQ ID NO: 6627 - DNA, 129 bp, Artificial Sequence
  Description of Artificial Sequence: Synthetic antibody
tgcctgagatctgacgacacggccgtgtattactgtgcgagagctgaaggttctagtattacgatttttggagtggttactagggccctcgcgggctactactacggtatggacgtctggggccaaggg

SEQ ID NO: 6628 - protein, 43 aa, Artificial Sequence
  Description of Artificial Sequence: Synthetic antibody
CLRSDDTAVYYCARAEGSSITIFGVVTRALAGYYYGMDVWGQG

SEQ ID NO: 6629 - DNA, 129 bp, Artificial Sequence
  Description of Artificial Sequence: Synthetic antibody
agcctgagatctgacgacacggccgtgtattactgtgcgagagctgaaggttctagtattacgatttttggagtggttactagggccctcgcgggctactactacggtatggacgtctggggccaaggg

SEQ ID NO: 6630 - protein, 43 aa, Artificial Sequence
  Description of Artificial Sequence: Synthetic antibody
SLRSDDTAVYYCARAEGSSITIFGVVTRALAGYYYGMDVWGQG

SEQ ID NO: 6631 - protein, 21 aa, Artificial Sequence
  Description of Artificial Sequence: Synthetic antibody
CARGNIAAAGTNYYYYGMDVW

SEQ ID NO: 6632 - DNA, 129 bp, Artificial Sequence
  Description of Artificial Sequence: Synthetic antibody
tgcacagcctacttggagctgagcagcctgagatctgaggacacggccgtgtattactgtgcgagaggcaacatagcagcagctggtacaaactactactactacggtatggacgtctggggccaaggg

SEQ ID NO: 6633 - protein, 43 aa, Artificial Sequence
  Description of Artificial Sequence: Synthetic antibody
CTAYLELSSLRSEDTAVYYCARGNIAAAGTNYYYYGMDVWGQG

SEQ ID NO: 6634 - DNA, 129 bp, Artificial Sequence
  Description of Artificial Sequence: Synthetic antibody
agcacagcctacatggagctgagcagcctgagatctgaggacacggccgtgtattactgtgcgagaggcaacatagcagcagctggtacaaactactactactacggtatggacgtctggggccaaggg

SEQ ID NO: 6635 - protein, 43 aa, Artificial Sequence
  Description of Artificial Sequence: Synthetic antibody
STAYMELSSLRSEDTAVYYCARGNIAAAGTNYYYYGMDVWGQG

SEQ ID NO: 6636 - protein, 17 aa, Artificial Sequence
  Description of Artificial Sequence: Synthetic antibody
CGRRGNFKYSTPVGDYW

SEQ ID NO: 6637 - DNA, 129 bp, Artificial Sequence
  Description of Artificial Sequence: Synthetic antibody
gacaacgccatcaactcactgtatctgcaaatgaacagcctgagagccgaggacacggccgtgtattactgtgggaggagagggaattttaagtatagcaccccggtgggggactactggggccaggga

SEQ ID NO: 6638 - protein, 43 aa, Artificial Sequence
  Description of Artificial Sequence: Synthetic antibody
DNAINSLYLQMNSLRAEDTAVYYCGRRGNFKYSTPVGDYWGQG

SEQ ID NO: 6639 - DNA, 129 bp, Artificial Sequence
  Description of Artificial Sequence: Synthetic antibody
gacaacgccaagaactcactgtatctgcaaatgaacagcctgagagccgaggacacggccgtgtattactgtgggaggagagggaattttaagtatagcaccccggtgggggactactggggccaggga

SEQ ID NO: 6640 - protein, 43 aa, Artificial Sequence
  Description of Artificial Sequence: Synthetic antibody
DNAKNSLYLQMNSLRAEDTAVYYCGRRGNFKYSTPVGDYWGQG

SEQ ID NO: 6641 - protein, 15 aa, Artificial Sequence
  Description of Artificial Sequence: Synthetic antibody
CARGLYGGNREGAYW

SEQ ID NO: 6642 - DNA, 129 bp, Artificial Sequence
  Description of Artificial Sequence: Synthetic antibody
tccagggacaacgccaacaattccctgtatctgcaaatgaacagtctcagagccgaggacacggccttctattactgtgcgagaggtctctacggtggtaaccgggagggtgcctactggggccaggga

SEQ ID NO: 6643 - protein, 43 aa, Artificial Sequence
  Description of Artificial Sequence: Synthetic antibody
SRDNANNSLYLQMNSLRAEDTAFYYCARGLYGGNREGAYWGQG

SEQ ID NO: 6644 - DNA, 129 bp, Artificial Sequence
  Description of Artificial Sequence: Synthetic antibody
tccagagacaacgccaacaattccctgtatctgcaaatgaacagtctcagagccgaggacacggccttctattactgtgcgagaggtctctacggtggtaaccgggagggtgcctactggggccaggga

SEQ ID NO: 6645 - protein, 15 aa, Artificial Sequence
  Description of Artificial Sequence: Synthetic antibody
CARDAPIAASWFDPW

SEQ ID NO: 6646 - DNA, 129 bp, Artificial Sequence
  Description of Artificial Sequence: Synthetic antibody
accaggaactcctccataagaacagcctacatggagctgagcagcctgagatctgaggacacggccgtgtattactgtgcgagggatgcccccatagctgcgagctggttcgacccctggggccaggga

SEQ ID NO: 6647 - protein, 43 aa, Artificial Sequence
  Description of Artificial Sequence: Synthetic antibody
TRNSSIRTAYMELSSLRSEDTAVYYCARDAPIAASWFDPWGQG

SEQ ID NO: 6648 - DNA, 129 bp, Artificial Sequence
  Description of Artificial Sequence: Synthetic antibody
accaggaactcctccataacaacagcctacatggagctgagcagcctgatatctgaggacacggccgtgtattactgtgcgagggatgcccccatagctgcgagctggttcgacccctggggccaggga

SEQ ID NO: 6649 - protein, 43 aa, Artificial Sequence
  Description of Artificial Sequence: Synthetic antibody
TRNSSITTAYMELSSLISEDTAVYYCARDAPIAASWFDPWGQG

SEQ ID NO: 6650 - protein, 16 aa, Artificial Sequence
  Description of Artificial Sequence: Synthetic antibody
CATRKPEGHYYGMDVW

SEQ ID NO: 6651 - DNA, 129 bp, Artificial Sequence
  Description of Artificial Sequence: Synthetic antibody
ttatataattccaagaacacgctgtatctgcaaatgaacagcctgagagccgaggacacggccgtatattactgtgcgactcgtaaaccagaaggccactactacggtatggacgtctggggccaaggg

SEQ ID NO: 6652 - protein, 43 aa, Artificial Sequence
  Description of Artificial Sequence: Synthetic antibody
LYNSKNTLYLQMNSLRAEDTAVYYCATRKPEGHYYGMDVWGQG

SEQ ID NO: 6653 - DNA, 129 bp, Artificial Sequence
  Description of Artificial Sequence: Synthetic antibody
agagataattccaagaacacgctgtatctgcaaatgaacagcctgagagccgaggacacggccgtatattactgtgcgactcgtaaaccagaaggccactactacggtatggacgtctggggccaaggg

SEQ ID NO: 6654 - protein, 43 aa, Artificial Sequence
  Description of Artificial Sequence: Synthetic antibody
RDNSKNTLYLQMNSLRAEDTAVYYCATRKPEGHYYGMDVWGQG

SEQ ID NO: 6655 - protein, 14 aa, Artificial Sequence
  Description of Artificial Sequence: Synthetic antibody
CARGRGVRGAYDYW

SEQ ID NO: 6656 - DNA, 129 bp, Artificial Sequence
  Description of Artificial Sequence: Synthetic antibody
ttatctgtagacacgtccaagaaccagttctccctgaagctgagctctgtgaccgccgcggacacggctgtgtattactgtgcgagaggccgtggggttcggggagcctatgactactggggccaggga

SEQ ID NO: 6657 - protein, 43 aa, Artificial Sequence
  Description of Artificial Sequence: Synthetic antibody
LSVDTSKNQFSLKLSSVTAADTAVYYCARGRGVRGAYDYWGQG

SEQ ID NO: 6658 - DNA, 129 bp, Artificial Sequence
  Description of Artificial Sequence: Synthetic antibody
atatcagtagacacgtccaagaaccagttctccctgaagctgagctctgtgaccgccgcggacacggctgtgtattactgtgcgagaggccgtggggttcggggagcctatgactactggggccaggga

SEQ ID NO: 6659 - protein, 43 aa, Artificial Sequence
  Description of Artificial Sequence: Synthetic antibody
ISVDTSKNQFSLKLSSVTAADTAVYYCARGRGVRGAYDYWGQG

SEQ ID NO: 6660 - protein, 26 aa, Artificial Sequence
  Description of Artificial Sequence: Synthetic antibody
CARGKGGGFTMVRGVIIGGYNWFDPW

SEQ ID NO: 6661 - DNA, 129 bp, Artificial Sequence
  Description of Artificial Sequence: Synthetic antibody
gtgctgagcagcctgagatctgaggacacggccgtgtattactgtgcgagaggcaaaggcgggggatttactatggttcggggagttattataggcgggtacaactggttcgacccctggggccaggga

SEQ ID NO: 6662 - protein, 43 aa, Artificial Sequence
  Description of Artificial Sequence: Synthetic antibody
VLSSLRSEDTAVYYCARGKGGGFTMVRGVIIGGYNWFDPWGQG

SEQ ID NO: 6663 - DNA, 129 bp, Artificial Sequence
  Description of Artificial Sequence: Synthetic antibody
gagctgagcagcctgagatctgaggacacggccgtgtattactgtgcgagaggcaaaggcgggggatttactatggttcggggagttattataggcgggtacaactggttcgacccctggggccaggga

SEQ ID NO: 6664 - protein, 43 aa, Artificial Sequence
  Description of Artificial Sequence: Synthetic antibody
ELSSLRSEDTAVYYCARGKGGGFTMVRGVIIGGYNWFDPWGQG

SEQ ID NO: 6665 - protein, 18 aa, Artificial Sequence
  Description of Artificial Sequence: Synthetic antibody
CARDIVGVGDPPIPFDYW

SEQ ID NO: 6666 - DNA, 129 bp, Artificial Sequence
  Description of Artificial Sequence: Synthetic antibody
aaatccacgagcacagcctacatggagctgagcagcctgagatctgaggacacggccgtgtattactgtgcgagagatatcgtgggagtcggtgacccacccatcccgtttgactactggggccaggga

SEQ ID NO: 6667 - protein, 43 aa, Artificial Sequence
  Description of Artificial Sequence: Synthetic antibody
KSTSTAYMELSSLRSEDTAVYYCARDIVGVGDPPIPFDYWGQG

SEQ ID NO: 6668 - DNA, 129 bp, Artificial Sequence
  Description of Artificial Sequence: Synthetic antibody
aaatccacgagcacagcctacatggagctgagcagcccgagatctgaggacacggccgtgtattactgtgcgagagatatcgtgggagtcggtgacccacccatcccgtttgactactggggccaggga

SEQ ID NO: 6669 - protein, 43 aa, Artificial Sequence
  Description of Artificial Sequence: Synthetic antibody
KSTSTAYMELSSPRSEDTAVYYCARDIVGVGDPPIPFDYWGQG

SEQ ID NO: 6670 - protein, 10 aa, Artificial Sequence
  Description of Artificial Sequence: Synthetic antibody
CARRGYFDVW

SEQ ID NO: 6671 - DNA, 129 bp, Artificial Sequence
  Description of Artificial Sequence: Synthetic antibody
tgtcgagtaaccttattagtagacacgtccaagagccagttctccctgaagctgacctctgtgaccgccgcggacacggctgtgtattactgtgcgagaaggggctacttcgatgtctggggccgtggc

SEQ ID NO: 6672 - protein, 43 aa, Artificial Sequence
  Description of Artificial Sequence: Synthetic antibody
CRVTLLVDTSKSQFSLKLTSVTAADTAVYYCARRGYFDVWGRG

SEQ ID NO: 6673 - DNA, 129 bp, Artificial Sequence
  Description of Artificial Sequence: Synthetic antibody
agtcgagtaaccatattagtagacacgtccaagagccagttctccctgaagctgacctctgtgaccgccgcggacacggctgtgtattactgtgcgagaaggggctacttcgatgtctggggccgtggc

SEQ ID NO: 6674 - protein, 43 aa, Artificial Sequence
  Description of Artificial Sequence: Synthetic antibody
SRVTILVDTSKSQFSLKLTSVTAADTAVYYCARRGYFDVWGRG

SEQ ID NO: 6675 - protein, 17 aa, Artificial Sequence
  Description of Artificial Sequence: Synthetic antibody
CARDRRPLAAAGYLDYW

SEQ ID NO: 6676 - DNA, 129 bp, Artificial Sequence
  Description of Artificial Sequence: Synthetic antibody
gacacgtccacgagcacagtctacatggagctgagcagcctgagatctgaggacacggccgtgtattactgtgcgagagacaggcgccccctggcagcggctggttatcttgactactggggccaggga

SEQ ID NO: 6677 - protein, 43 aa, Artificial Sequence
  Description of Artificial Sequence: Synthetic antibody
DTSTSTVYMELSSLRSEDTAVYYCARDRRPLAAAGYLDYWGQG

SEQ ID NO: 6678 - DNA, 129 bp, Artificial Sequence
  Description of Artificial Sequence: Synthetic antibody
gacacgtccacgagcacagtctacatggagctgagcagcctgagatctgaggacacggccgtgtattactgtgcgagagacaggcgccccctggcagcagctggttatcttgactactggggccaggga

SEQ ID NO: 6679 - protein, 20 aa, Artificial Sequence
  Description of Artificial Sequence: Synthetic antibody
CARDTNDFWSGYSINWFDPW

SEQ ID NO: 6680 - DNA, 129 bp, Artificial Sequence
  Description of Artificial Sequence: Synthetic antibody
gcgagcacagcctacatggagctgagcagcctgggatctgaagacacggctgtgcattactgtgcgagagatacaaacgatttttggagtggttattctatcaactggttcgacccctggggccaggga

SEQ ID NO: 6681 - protein, 43 aa, Artificial Sequence
  Description of Artificial Sequence: Synthetic antibody
ASTAYMELSSLGSEDTAVHYCARDTNDFWSGYSINWFDPWGQG

SEQ ID NO: 6682 - DNA, 129 bp, Artificial Sequence
  Description of Artificial Sequence: Synthetic antibody
gcgagcacagcctacatggagctgagcagcctgagatctgaagacacggctgtgtattactgtgcgagagatacaaacgatttttggagtggttattctatcaactggttcgacccctggggccaggga

SEQ ID NO: 6683 - protein, 43 aa, Artificial Sequence
  Description of Artificial Sequence: Synthetic antibody
ASTAYMELSSLRSEDTAVYYCARDTNDFWSGYSINWFDPWGQG

SEQ ID NO: 6684 - protein, 17 aa, Artificial Sequence
  Description of Artificial Sequence: Synthetic antibody
CARDGSLRGIARGYDYW

SEQ ID NO: 6685 - DNA, 129 bp, Artificial Sequence
  Description of Artificial Sequence: Synthetic antibody
gacaacgccaagaactcactgtatctgcaaatgaacagcctgagagctgaggacacggccgtgtattactgtgcgagagatggtagtctgcgcggtatagcaagaggttatgactactggggccaggga

SEQ ID NO: 6686 - protein, 43 aa, Artificial Sequence
  Description of Artificial Sequence: Synthetic antibody
DNAKNSLYLQMNSLRAEDTAVYYCARDGSLRGIARGYDYWGQG

SEQ ID NO: 6687 - DNA, 129 bp, Artificial Sequence
  Description of Artificial Sequence: Synthetic antibody
gacaacgccaagaactcactgtatctgcaaatgaacagcctgagagccgaggacacggccgtgtattactgtgcgagagatggtagtctgcgcggtatagcaagaggttatgactactggggccaggga

SEQ ID NO: 6688 - protein, 17 aa, Artificial Sequence
  Description of Artificial Sequence: Synthetic antibody
CAKDIGQLVREGGFDYW

SEQ ID NO: 6689 - DNA, 129 bp, Artificial Sequence
  Description of Artificial Sequence: Synthetic antibody
gacaacgccaagaactccctgtatctgcaaatgaacagtctgagagctgaggacacggccttgtattactgtgcaaaagatatagggcagctcgttcgggaaggcggctttgactactggggccaggga

SEQ ID NO: 6690 - protein, 43 aa, Artificial Sequence
  Description of Artificial Sequence: Synthetic antibody
DNAKNSLYLQMNSLRAEDTALYYCAKDIGQLVREGGFDYWGQG

SEQ ID NO: 6691 - DNA, 129 bp, Artificial Sequence
  Description of Artificial Sequence: Synthetic antibody
gacaacgccaagaactccctgtatctgcaaatgaacactctgagagctgaggacacggccttctattactgtgcaaaagatatagggcagctcgttcgggaaggcggctttgactactggggccaggga

SEQ ID NO: 6692 - protein, 43 aa, Artificial Sequence
  Description of Artificial Sequence: Synthetic antibody
DNAKNSLYLQMNTLRAEDTAFYYCAKDIGQLVREGGFDYWGQG

SEQ ID NO: 6693 - protein, 16 aa, Artificial Sequence
  Description of Artificial Sequence: Synthetic antibody
CAKVGAGWRVYYFDYW

SEQ ID NO: 6694 - DNA, 129 bp, Artificial Sequence
  Description of Artificial Sequence: Synthetic antibody
ttagataatcccaagaacacgctgtatctgcaaatgaacagcctgagagccgaggacacggccgtatattattgtgcgaaagtgggggcagggtggcgcgtctactactttgactactggggccaggga

SEQ ID NO: 6695 - protein, 43 aa, Artificial Sequence
  Description of Artificial Sequence: Synthetic antibody
LDNPKNTLYLQMNSLRAEDTAVYYCAKVGAGWRVYYFDYWGQG

SEQ ID NO: 6696 - DNA, 129 bp, Artificial Sequence
  Description of Artificial Sequence: Synthetic antibody
agagataatcccaagaacacgctgtatctgcaaatgaacagcctgagagccgaggacacggccgtatattattgtgcgaaagtgggggcagggtggcgcgtctactactttgactactggggccaggga

SEQ ID NO: 6697 - protein, 43 aa, Artificial Sequence
  Description of Artificial Sequence: Synthetic antibody
RDNPKNTLYLQMNSLRAEDTAVYYCAKVGAGWRVYYFDYWGQG

SEQ ID NO: 6698 - protein, 15 aa, Artificial Sequence
  Description of Artificial Sequence: Synthetic antibody
CAKDHSSSWYSIDYW

SEQ ID NO: 6699 - DNA, 129 bp, Artificial Sequence
  Description of Artificial Sequence: Synthetic antibody
tccagagataattccaagaacacgctgtatctgcaaatgaacagcctgagaggcgaggacacggccgtatattactgtgcgaaagaccatagcagcagctggtattctattgactactggggccaggga

SEQ ID NO: 6700 - protein, 43 aa, Artificial Sequence
  Description of Artificial Sequence: Synthetic antibody
SRDNSKNTLYLQMNSLRGEDTAVYYCAKDHSSSWYSIDYWGQG

SEQ ID NO: 6701 - DNA, 129 bp, Artificial Sequence
  Description of Artificial Sequence: Synthetic antibody
tccagagataattccaagaacacgctgtatctcaaaatgaaccgcgtgagaggcgaggacacggccgtatattactgtgcgaaagaccatagcagcagctggtattctattgactactggggccaggga

SEQ ID NO: 6702 - protein, 43 aa, Artificial Sequence
  Description of Artificial Sequence: Synthetic antibody
SRDNSKNTLYLKMNRVRGEDTAVYYCAKDHSSSWYSIDYWGQG

SEQ ID NO: 6703 - protein, 15 aa, Artificial Sequence
  Description of Artificial Sequence: Synthetic antibody
CTTDLGAGPRPFDNW

SEQ ID NO: 6704 - DNA, 129 bp, Artificial Sequence
  Description of Artificial Sequence: Synthetic antibody
tcaagagatgattcaagaaacatgctgtttctggacatgaacaccgtgaaaacggacgacacagccgtctatcactgcaccacagatctgggagcgggaccacgcccctttgacaactggggccaggga

SEQ ID NO: 6705 - protein, 43 aa, Artificial Sequence
  Description of Artificial Sequence: Synthetic antibody
SRDDSRNMLFLDMNTVKTDDTAVYHCTTDLGAGPRPFDNWGQG

SEQ ID NO: 6706 - DNA, 129 bp, Artificial Sequence
  Description of Artificial Sequence: Synthetic antibody
tcaagagatgattcaagaaacacgctgtttctggaaatgaacaccgtgaaaacggacgacacagccgtctattactgcaccacagatctgggagcgggaccacgcccctttgacaactggggccaggga

SEQ ID NO: 6707 - protein, 43 aa, Artificial Sequence
  Description of Artificial Sequence: Synthetic antibody
SRDDSRNTLFLEMNTVKTDDTAVYYCTTDLGAGPRPFDNWGQG

SEQ ID NO: 6708 - protein, 17 aa, Artificial Sequence
  Description of Artificial Sequence: Synthetic antibody
CSTHRGVGGSGSYLDDW

SEQ ID NO: 6709 - DNA, 129 bp, Artificial Sequence
  Description of Artificial Sequence: Synthetic antibody
gacaattccaagaacacactctatcttcaaatgaacagcctgagagtcgacgacacggccgtgtattactgttcgactcatcggggggtgggtggtagtggctcctaccttgacgactggggccaggga

SEQ ID NO: 6710 - protein, 43 aa, Artificial Sequence
  Description of Artificial Sequence: Synthetic antibody
DNSKNTLYLQMNSLRVDDTAVYYCSTHRGVGGSGSYLDDWGQG

SEQ ID NO: 6711 - DNA, 129 bp, Artificial Sequence
  Description of Artificial Sequence: Synthetic antibody
gacaattccaacaacacactctatcttcaaatgaacagcctgagagtcgacgacacggccgtgtattactgttcgactcatcggggggtgggtggtagtggctcctaccttgacgactggggccaggga

SEQ ID NO: 6712 - protein, 43 aa, Artificial Sequence
  Description of Artificial Sequence: Synthetic antibody
DNSNNTLYLQMNSLRVDDTAVYYCSTHRGVGGSGSYLDDWGQG

SEQ ID NO: 6713 - protein, 14 aa, Artificial Sequence
  Description of Artificial Sequence: Synthetic antibody
CAKDQWAAAGFDYW

SEQ ID NO: 6714 - DNA, 129 bp, Artificial Sequence
  Description of Artificial Sequence: Synthetic antibody
ttctccagagacaattccaagaacacgctgtatctgcaaatgaacagcctgagagccgaggacacggccgtatattactgtgcgaaagatcaatgggcagcagctggattcgactactggggccaggga

SEQ ID NO: 6715 - protein, 43 aa, Artificial Sequence
  Description of Artificial Sequence: Synthetic antibody
FSRDNSKNTLYLQMNSLRAEDTAVYYCAKDQWAAAGFDYWGQG

SEQ ID NO: 6716 - DNA, 129 bp, Artificial Sequence
  Description of Artificial Sequence: Synthetic antibody
atctccagagacaattccaagaacacgctgtatctgcaaatgaacagcctgagagccgaggacacggccgtatattactgtgcgaaagatcaatgggcagcagctggattcgactactggggccaggga

SEQ ID NO: 6717 - protein, 43 aa, Artificial Sequence
  Description of Artificial Sequence: Synthetic antibody
ISRDNSKNTLYLQMNSLRAEDTAVYYCAKDQWAAAGFDYWGQG

SEQ ID NO: 6718 - protein, 13 aa, Artificial Sequence
  Description of Artificial Sequence: Synthetic antibody
CARDWGEEQWSYW

SEQ ID NO: 6719 - DNA, 129 bp, Artificial Sequence
  Description of Artificial Sequence: Synthetic antibody
accatgaccacagacacatccacgagcacagcctacatggagctgaggagcctgagatctgacgacacggccgtgtattactgtgcgagagattggggggaggagcagtggtcctactggggccaggga

SEQ ID NO: 6720 - protein, 43 aa, Artificial Sequence
  Description of Artificial Sequence: Synthetic antibody
TMTTDTSTSTAYMELRSLRSDDTAVYYCARDWGEEQWSYWGQG

SEQ ID NO: 6721 - DNA, 129 bp, Artificial Sequence
  Description of Artificial Sequence: Synthetic antibody
accatgaccacacacacatccacgagcacagcctacatggagctgaggagcctgagatctgacgacacggccgtgtattactgtgcgagagattggggggaggagcagtggtcctactggggccaggga

SEQ ID NO: 6722 - protein, 43 aa, Artificial Sequence
  Description of Artificial Sequence: Synthetic antibody
TMTTHTSTSTAYMELRSLRSDDTAVYYCARDWGEEQWSYWGQG

SEQ ID NO: 6723 - protein, 12 aa, Artificial Sequence
  Description of Artificial Sequence: Synthetic antibody
CAREDHFGMDVW

SEQ ID NO: 6724 - DNA, 129 bp, Artificial Sequence
  Description of Artificial Sequence: Synthetic antibody
ttcaccatctcctgggacaacgccaataactcactgtatctgcaaatgaacagcctgagagccgaggacacggccgtgtattactgtgcgagagaggaccacttcggtatggacgtctggggccatggg

SEQ ID NO: 6725 - protein, 43 aa, Artificial Sequence
  Description of Artificial Sequence: Synthetic antibody
FTISWDNANNSLYLQMNSLRAEDTAVYYCAREDHFGMDVWGHG

SEQ ID NO: 6726 - DNA, 129 bp, Artificial Sequence
  Description of Artificial Sequence: Synthetic antibody
ttcaccatctccagggacaacgccaagaactcactgtatctgcaaatgaacagcctgagagccgaggacacggccgtgtattactgtgcgagagaggaccacttcggtatggacgtctggggccatggg

SEQ ID NO: 6727 - protein, 43 aa, Artificial Sequence
  Description of Artificial Sequence: Synthetic antibody
FTISRDNAKNSLYLQMNSLRAEDTAVYYCAREDHFGMDVWGHG

SEQ ID NO: 6728 - protein, 17 aa, Artificial Sequence
  Description of Artificial Sequence: Synthetic antibody
CARDMPYGSGSYYVDYW

SEQ ID NO: 6729 - DNA, 129 bp, Artificial Sequence
  Description of Artificial Sequence: Synthetic antibody
gacacatccatgagcacagcctacacggagctgaggagcctgagatctgacgacacggccgtgtattactgtgcgagagatatgccatatggttcggggagttattacgttgactactggggccaggga

SEQ ID NO: 6730 - protein, 43 aa, Artificial Sequence
  Description of Artificial Sequence: Synthetic antibody
DTSMSTAYTELRSLRSDDTAVYYCARDMPYGSGSYYVDYWGQG

SEQ ID NO: 6731 - DNA, 129 bp, Artificial Sequence
  Description of Artificial Sequence: Synthetic antibody
gacacatccacgagcacagcctacatggagctgaggagcctgagatctgacgacacggccgtgtattactgtgcgagagatatgccatatggttcggggagttattacgttgactactggggccaggga

SEQ ID NO: 6732 - protein, 43 aa, Artificial Sequence
  Description of Artificial Sequence: Synthetic antibody
DTSTSTAYMELRSLRSDDTAVYYCARDMPYGSGSYYVDYWGQG

SEQ ID NO: 6733 - protein, 23 aa, Artificial Sequence
  Description of Artificial Sequence: Synthetic antibody
CARGGYCSGGSCYSLYYYGMDVW

SEQ ID NO: 6734 - DNA, 129 bp, Artificial Sequence
  Description of Artificial Sequence: Synthetic antibody
ctgtatctgcaaatgaacagtctgagagccgaggacacggctgtgtattactgtgcaaggggtggatattgtagtggtggtagctgctactccctctactactacggtatggacgtctggggccaaggg

SEQ ID NO: 6735 - protein, 43 aa, Artificial Sequence
  Description of Artificial Sequence: Synthetic antibody
LYLQMNSLRAEDTAVYYCARGGYCSGGSCYSLYYYGMDVWGQG

SEQ ID NO: 6736 - DNA, 129 bp, Artificial Sequence
  Description of Artificial Sequence: Synthetic antibody
ctgtatctgcaaatgaacagtctgagagccgaggacacggctgtgtattactgtgcaagaggtggatattgtagtggtggtagctgctactccctctactactacggtatggacgtctggggccaaggg

SEQ ID NO: 6737 - protein, 16 aa, Artificial Sequence
  Description of Artificial Sequence: Synthetic antibody
CAKEDYGGNSPPFDYW

SEQ ID NO: 6738 - DNA, 129 bp, Artificial Sequence
  Description of Artificial Sequence: Synthetic antibody
agagataattccgagaacacgctgtatctgcaaatgaacagcctgagagccgaggacacggccgtatattactgtgcgaaagaggactacggtggtaactcccctccctttgactactggggccaggga

SEQ ID NO: 6739 - protein, 43 aa, Artificial Sequence
  Description of Artificial Sequence: Synthetic antibody
RDNSENTLYLQMNSLRAEDTAVYYCAKEDYGGNSPPFDYWGQG

SEQ ID NO: 6740 - DNA, 129 bp, Artificial Sequence
  Description of Artificial Sequence: Synthetic antibody
agagataattccaagaacacgctgtatctgcaaatgaacagcctgagagccgaggacacggccgtatattactgtgcgaaagaggactacggtggtaactcccctccctttgactactggggccaggga

SEQ ID NO: 6741 - protein, 43 aa, Artificial Sequence
  Description of Artificial Sequence: Synthetic antibody
RDNSKNTLYLQMNSLRAEDTAVYYCAKEDYGGNSPPFDYWGQG

SEQ ID NO: 6742 - protein, 21 aa, Artificial Sequence
  Description of Artificial Sequence: Synthetic antibody
CARDYGWGIAAADGVDWFDPW

SEQ ID NO: 6743 - DNA, 129 bp, Artificial Sequence
  Description of Artificial Sequence: Synthetic antibody
tgcacagcctacttggagctgaggagcctgagatctgacgacacggccgtgtattactgtgcgagagattatggttggggtatagcagcagctgatggggtggactggttcgacccctggggccaggga

SEQ ID NO: 6744 - protein, 43 aa, Artificial Sequence
  Description of Artificial Sequence: Synthetic antibody
CTAYLELRSLRSDDTAVYYCARDYGWGIAAADGVDWFDPWGQG

SEQ ID NO: 6745 - DNA, 129 bp, Artificial Sequence
  Description of Artificial Sequence: Synthetic antibody
agcacagcctacatggagctgaggagcctgagatctgacgacacggccgtgtattactgtgcgagagattatggttggggtatagcagcagctgatggggtggactggttcgacccctggggccaggga

SEQ ID NO: 6746 - protein, 43 aa, Artificial Sequence
  Description of Artificial Sequence: Synthetic antibody
STAYMELRSLRSDDTAVYYCARDYGWGIAAADGVDWFDPWGQG

SEQ ID NO: 6747 - protein, 14 aa, Artificial Sequence
  Description of Artificial Sequence: Synthetic antibody
CAKGFDYGGNLDYW

SEQ ID NO: 6748 - DNA, 129 bp, Artificial Sequence
  Description of Artificial Sequence: Synthetic antibody
atctccatatataattccaagaacacagtctctctacaaatgaatagcctgagagccgaggacacggccgcatattactgtgcgaaagggtttgactacggtggtaaccttgattattggggccaggga

SEQ ID NO: 6749 - protein, 43 aa, Artificial Sequence
  Description of Artificial Sequence: Synthetic antibody
ISIYNSKNTVSLQMNSLRAEDTAAYYCAKGFDYGGNLDYWGQG

SEQ ID NO: 6750 - DNA, 129 bp, Artificial Sequence
  Description of Artificial Sequence: Synthetic antibody
atctccagagataattccaagaacacagtctctctacaaatgaatagcctgagagccgaggacacggccgcatattactgtgcgaaagggtttgactacggtggtaaccttgattattggggccaggga

SEQ ID NO: 6751 - protein, 43 aa, Artificial Sequence
  Description of Artificial Sequence: Synthetic antibody
ISRDNSKNTVSLQMNSLRAEDTAAYYCAKGFDYGGNLDYWGQG

SEQ ID NO: 6752 - protein, 24 aa, Artificial Sequence
  Description of Artificial Sequence: Synthetic antibody
CARDFSLSQWLVRSRGPNDAFDIW

SEQ ID NO: 6753 - DNA, 129 bp, Artificial Sequence
  Description of Artificial Sequence: Synthetic antibody
tatctgcaaatgaacagcctgagggacgaggacacggctgtgtattactgcgcgagagatttttcgttgtcgcagtggctggtacgttctaggggaccaaatgatgcttttgatatctggggccaaggg

SEQ ID NO: 6754 - protein, 43 aa, Artificial Sequence
  Description of Artificial Sequence: Synthetic antibody
YLQMNSLRDEDTAVYYCARDFSLSQWLVRSRGPNDAFDIWGQG

SEQ ID NO: 6755 - DNA, 129 bp, Artificial Sequence
  Description of Artificial Sequence: Synthetic antibody
tatctgcaaatgaacagcctgagagacgaggacacggctgtgtattactgtgcgagagatttttcgttgtcgcagtggctggtacgttctaggggaccaaatgatgcttttgatatctggggccaaggg

SEQ ID NO: 6756 - protein, 14 aa, Artificial Sequence
  Description of Artificial Sequence: Synthetic antibody
CAKFDGSEWYFDLW

SEQ ID NO: 6757 - DNA, 129 bp, Artificial Sequence
  Description of Artificial Sequence: Synthetic antibody
atctccatacacaattccaagaacacgctgtatctgcaaatgaacagcctgagagccgaggacacggccgtatattactgtgcgaaatttgatggcagcgagtggtacttcgatctctggggccgtggc

SEQ ID NO: 6758 - protein, 43 aa, Artificial Sequence
  Description of Artificial Sequence: Synthetic antibody
ISIHNSKNTLYLQMNSLRAEDTAVYYCAKFDGSEWYFDLWGRG

SEQ ID NO: 6759 - DNA, 129 bp, Artificial Sequence
  Description of Artificial Sequence: Synthetic antibody
atctccagagacaattccaagaacacgctgtatctgcaaatgaacagcctgagagccgaggacacggccgtatattactgtgcgaaatttgatggcagcgagtggtacttcgatctctggggccgtggc

SEQ ID NO: 6760 - protein, 43 aa, Artificial Sequence
  Description of Artificial Sequence: Synthetic antibody
ISRDNSKNTLYLQMNSLRAEDTAVYYCAKFDGSEWYFDLWGRG

SEQ ID NO: 6761 - protein, 15 aa, Artificial Sequence
  Description of Artificial Sequence: Synthetic antibody
CARISDGSGSQIDYW

SEQ ID NO: 6762 - DNA, 129 bp, Artificial Sequence
  Description of Artificial Sequence: Synthetic antibody
ctccaaggacacctccaaaaccaggtggtccttacaatgaccaacatggaccctgtggacacagccacgtattactgtgcacggatatcggatggttcggggagtcaaattgactactggggccaggga

SEQ ID NO: 6763 - protein, 43 aa, Artificial Sequence
  Description of Artificial Sequence: Synthetic antibody
LQGHLQNQVVLTMTNMDPVDTATYYCARISDGSGSQIDYWGQG

SEQ ID NO: 6764 - DNA, 129 bp, Artificial Sequence
  Description of Artificial Sequence: Synthetic antibody
tccaaggacacctccaaaaaccaggtggtccttacaatgaccaacatggaccctgtggacacagccacgtattactgtgcacggatatcggatggttcggggagtcaaattgactactggggccaggga

SEQ ID NO: 6765 - protein, 43 aa, Artificial Sequence
  Description of Artificial Sequence: Synthetic antibody
SKDTSKNQVVLTMTNMDPVDTATYYCARISDGSGSQIDYWGQG

SEQ ID NO: 6766 - protein, 21 aa, Artificial Sequence
  Description of Artificial Sequence: Synthetic antibody
CARDCGDLRGSNCYGDSFDPW

SEQ ID NO: 6767 - DNA, 129 bp, Artificial Sequence
  Description of Artificial Sequence: Synthetic antibody
aacactgtctacttggagctgaggagcctgagatctgacgacacggccgtatattactgtgcaagagattgcggggacctgcgtggttccaactgctatggggactcgttcgacccctggggccaggga

SEQ ID NO: 6768 - protein, 43 aa, Artificial Sequence
  Description of Artificial Sequence: Synthetic antibody
NTVYLELRSLRSDDTAVYYCARDCGDLRGSNCYGDSFDPWGQG

SEQ ID NO: 6769 - DNA, 129 bp, Artificial Sequence
  Description of Artificial Sequence: Synthetic antibody
aacacagtctacatggagctgaggagcctgagatctgacgacacggccgtatattactgtgcaagagattgcggggacctgcgtggttccaactgctatggggactcgttcgacccctggggccaggga

SEQ ID NO: 6770 - protein, 43 aa, Artificial Sequence
  Description of Artificial Sequence: Synthetic antibody
NTVYMELRSLRSDDTAVYYCARDCGDLRGSNCYGDSFDPWGQG

SEQ ID NO: 6771 - protein, 16 aa, Artificial Sequence
  Description of Artificial Sequence: Synthetic antibody
CAKGQDRYSSGWYYYW

SEQ ID NO: 6772 - DNA, 129 bp, Artificial Sequence
  Description of Artificial Sequence: Synthetic antibody
agagacaattccaagaacgcgctgtatctgcaaatgaacagcctgagagccgaggacacggctgtgtattactgtgcgaaaggccaagaccggtatagcagtggctggtactactactggggccaggga

SEQ ID NO: 6773 - protein, 43 aa, Artificial Sequence
  Description of Artificial Sequence: Synthetic antibody
RDNSKNALYLQMNSLRAEDTAVYYCAKGQDRYSSGWYYYWGQG

SEQ ID NO: 6774 - DNA, 129 bp, Artificial Sequence
  Description of Artificial Sequence: Synthetic antibody
agagacaattccaagaacacgctgtatctgcaaatgaacagcctgagagccgaggacacggctgtgtattactgtgcgaaaggccaagaccggtatagcagtggctggtactactactggggccaggga

SEQ ID NO: 6775 - protein, 43 aa, Artificial Sequence
  Description of Artificial Sequence: Synthetic antibody
RDNSKNTLYLQMNSLRAEDTAVYYCAKGQDRYSSGWYYYWGQG

SEQ ID NO: 6776 - protein, 16 aa, Artificial Sequence
  Description of Artificial Sequence: Synthetic antibody
CAHSGITMVRGVLDYW

SEQ ID NO: 6777 - DNA, 129 bp, Artificial Sequence
  Description of Artificial Sequence: Synthetic antibody
caaggacacctccaaaaccaggtggtccttacaatgaccaacatggaccctgtggacacagccacatattactgtgcacacagcggtattactatggttcggggagttttagactactggggccaggga

SEQ ID NO: 6778 - protein, 43 aa, Artificial Sequence
  Description of Artificial Sequence: Synthetic antibody
QGHLQNQVVLTMTNMDPVDTATYYCAHSGITMVRGVLDYWGQG

SEQ ID NO: 6779 - DNA, 129 bp, Artificial Sequence
  Description of Artificial Sequence: Synthetic antibody
aaggacacctccaaaaaccaggtggtccttacaatgaccaacatggaccctgtggacacagccacatattactgtgcacacagcggtattactatggttcggggagttttagactactggggccaggga

SEQ ID NO: 6780 - protein, 43 aa, Artificial Sequence
  Description of Artificial Sequence: Synthetic antibody
KDTSKNQVVLTMTNMDPVDTATYYCAHSGITMVRGVLDYWGQG

SEQ ID NO: 6781 - protein, 16 aa, Artificial Sequence
  Description of Artificial Sequence: Synthetic antibody
CAKDFHGIAAAGIDYW

SEQ ID NO: 6782 - DNA, 129 bp, Artificial Sequence
  Description of Artificial Sequence: Synthetic antibody
ttagataattccaagaacacgctgtatctgcaaatgaacagcctgagagccgaggacacggccgtatattactgtgcgaaagattttcacggtatagcagcagctggaattgactactggggccaggga

SEQ ID NO: 6783 - protein, 43 aa, Artificial Sequence
  Description of Artificial Sequence: Synthetic antibody
LDNSKNTLYLQMNSLRAEDTAVYYCAKDFHGIAAAGIDYWGQG

SEQ ID NO: 6784 - DNA, 129 bp, Artificial Sequence
  Description of Artificial Sequence: Synthetic antibody
agagataattccaagaacacgctgtatctgcaaatgaacagcctgagagccgaggacacggccgtatattactgtgcgaaagattttcacggtatagcagcagctggaattgactactggggccaggga

SEQ ID NO: 6785 - protein, 43 aa, Artificial Sequence
  Description of Artificial Sequence: Synthetic antibody
RDNSKNTLYLQMNSLRAEDTAVYYCAKDFHGIAAAGIDYWGQG

SEQ ID NO: 6786 - protein, 19 aa, Artificial Sequence
  Description of Artificial Sequence: Synthetic antibody
CGRDARSSGYSGYDMFDIW

SEQ ID NO: 6787 - DNA, 129 bp, Artificial Sequence
  Description of Artificial Sequence: Synthetic antibody
tccatcagcacagccttcatggaacttagcagtctgagatatgacgacacggccgtatattactgtgggagagatgcacggtctagtggctacagtggatatgatatgtttgatatctggggccaaggg

SEQ ID NO: 6788 - protein, 43 aa, Artificial Sequence
  Description of Artificial Sequence: Synthetic antibody
SISTAFMELSSLRYDDTAVYYCGRDARSSGYSGYDMFDIWGQG

SEQ ID NO: 6789 - DNA, 129 bp, Artificial Sequence
  Description of Artificial Sequence: Synthetic antibody
tccatcagcaaagccttcatggaacttagcagtctgagatatgacgacacggccgtatattactgtgggagagatgcacggtctagtggctacagtggatatgatatgtttgatatctggggccaaggg

SEQ ID NO: 6790 - protein, 43 aa, Artificial Sequence
  Description of Artificial Sequence: Synthetic antibody
SISKAFMELSSLRYDDTAVYYCGRDARSSGYSGYDMFDIWGQG

SEQ ID NO: 6791 - protein, 13 aa, Artificial Sequence
  Description of Artificial Sequence: Synthetic antibody
CARVRAGGVFDLW

SEQ ID NO: 6792 - DNA, 129 bp, Artificial Sequence
  Description of Artificial Sequence: Synthetic antibody
accatctcctgggacaacgccaagaactcactgtatctgcaaatgaacagcctgagagccgaggacacggccgtgtattactgtgcgagagtgagagccgggggtgtttttgatctctggggccaaggg

SEQ ID NO: 6793 - protein, 43 aa, Artificial Sequence
  Description of Artificial Sequence: Synthetic antibody
TISWDNAKNSLYLQMNSLRAEDTAVYYCARVRAGGVFDLWGQG

SEQ ID NO: 6794 - DNA, 129 bp, Artificial Sequence
  Description of Artificial Sequence: Synthetic antibody
accatctccagggacaacgccaagaactcactgtatctgcaaatgaacagcctgagagccgaggacacggccgtgtattactgtgcgagagtgagagccgggggtgtttttgatctctggggccaaggg

SEQ ID NO: 6795 - protein, 43 aa, Artificial Sequence
  Description of Artificial Sequence: Synthetic antibody
TISRDNAKNSLYLQMNSLRAEDTAVYYCARVRAGGVFDLWGQG

SEQ ID NO: 6796 - protein, 16 aa, Artificial Sequence
  Description of Artificial Sequence: Synthetic antibody
CAKDPKTTVSRLMSYW

SEQ ID NO: 6797 - DNA, 129 bp, Artificial Sequence
  Description of Artificial Sequence: Synthetic antibody
ttagacaattccaagaacacgctgtatctgcaaatgaacagcctgagagccgaggacacggccgtatattactgtgcgaaagatcctaaaactacggtgtcccgcctaatgagctactggggccaggga

SEQ ID NO: 6798 - protein, 43 aa, Artificial Sequence
  Description of Artificial Sequence: Synthetic antibody
LDNSKNTLYLQMNSLRAEDTAVYYCAKDPKTTVSRLMSYWGQG

SEQ ID NO: 6799 - DNA, 129 bp, Artificial Sequence
  Description of Artificial Sequence: Synthetic antibody
agagacaattccaagaacacgctgtatctgcaaatgaacagcctgagagccgaggacacggccgtatattactgtgcgaaagatcctaaaactacggtgtcccgcctaatgagctactggggccaggga

SEQ ID NO: 6800 - protein, 43 aa, Artificial Sequence
  Description of Artificial Sequence: Synthetic antibody
RDNSKNTLYLQMNSLRAEDTAVYYCAKDPKTTVSRLMSYWGQG

SEQ ID NO: 6801 - protein, 18 aa, Artificial Sequence
  Description of Artificial Sequence: Synthetic antibody
CAKDLDIAVAGSVGFDYW

SEQ ID NO: 6802 - DNA, 129 bp, Artificial Sequence
  Description of Artificial Sequence: Synthetic antibody
aacgccaagaactccgtgtatctgcaaatggacagtctgagagctgaggacacggccttatattactgtgcaaaagacttggatatagcagtggctggtagtgtgggctttgactactggggccaggga

SEQ ID NO: 6803 - protein, 43 aa, Artificial Sequence
  Description of Artificial Sequence: Synthetic antibody
NAKNSVYLQMDSLRAEDTALYYCAKDLDIAVAGSVGFDYWGQG

SEQ ID NO: 6804 - DNA, 129 bp, Artificial Sequence
  Description of Artificial Sequence: Synthetic antibody
aacgccaagaactccgtgtatctgcaaatgaacagtctgagagctgaggacacggccttatattactgtgcaaaagacttggatatagcagtggctggtagtgtgggctttgactactggggccaggga

SEQ ID NO: 6805 - protein, 43 aa, Artificial Sequence
  Description of Artificial Sequence: Synthetic antibody
NAKNSVYLQMNSLRAEDTALYYCAKDLDIAVAGSVGFDYWGQG

SEQ ID NO: 6806 - protein, 16 aa, Artificial Sequence
  Description of Artificial Sequence: Synthetic antibody
CARDERTMVRGEYDYW

SEQ ID NO: 6807 - DNA, 129 bp, Artificial Sequence
  Description of Artificial Sequence: Synthetic antibody
tgggacacgtccatcagcacagcctacatggagctgagcaggctgagatctgacgacacggccgtgtattactgtgcgagagatgaacgtactatggttcggggagaatatgactactggggccaggga

SEQ ID NO: 6808 - protein, 43 aa, Artificial Sequence
  Description of Artificial Sequence: Synthetic antibody
WDTSISTAYMELSRLRSDDTAVYYCARDERTMVRGEYDYWGQG

SEQ ID NO: 6809 - DNA, 129 bp, Artificial Sequence
  Description of Artificial Sequence: Synthetic antibody
agggacacgtccatcagcacagcctacatggagctgagcaggctgagatctgacgacacggccgtgtattactgtgcgagagatgaacgtactatggttcggggagaatatgactactggggccaggga

SEQ ID NO: 6810 - protein, 43 aa, Artificial Sequence
  Description of Artificial Sequence: Synthetic antibody
RDTSISTAYMELSRLRSDDTAVYYCARDERTMVRGEYDYWGQG

SEQ ID NO: 6811 - protein, 17 aa, Artificial Sequence
  Description of Artificial Sequence: Synthetic antibody
CAHRKRDYGNHLVFDPW

SEQ ID NO: 6812 - DNA, 129 bp, Artificial Sequence
  Description of Artificial Sequence: Synthetic antibody
gacacctccacagaccaggtggtcctttccatgaccgacatggaccctgtggacacaggcacatattattgtgcacacagaaaaagagattatggaaatcacttggtgttcgacccctggggccaggga

SEQ ID NO: 6813 - protein, 43 aa, Artificial Sequence
  Description of Artificial Sequence: Synthetic antibody
DTSTDQVVLSMTDMDPVDTGTYYCAHRKRDYGNHLVFDPWGQG

SEQ ID NO: 6814 - DNA, 129 bp, Artificial Sequence
  Description of Artificial Sequence: Synthetic antibody
ggacacctccacagaccaggtggtctttccgtgaccgacatggaccctgtggacacaggctcatattattgtgcacacagaaaaagagattatggaaatcacttggtgttcgacccctggggccaggga

SEQ ID NO: 6815 - protein, 43 aa, Artificial Sequence
  Description of Artificial Sequence: Synthetic antibody
GHLHRPGGLSVTDMDPVDTGSYYCAHRKRDYGNHLVFDPWGQG

SEQ ID NO: 6816 - protein, 14 aa, Artificial Sequence
  Description of Artificial Sequence: Synthetic antibody
CARDRPGAAAGDYW

SEQ ID NO: 6817 - DNA, 129 bp, Artificial Sequence
  Description of Artificial Sequence: Synthetic antibody
attaccgcggacaaatccacgagcacagcctacatggagctgagcagcctgagatctgaggacacggccgtgtattactgtgcgagagatcgacccggggcagcagctggtgactactggggccaggga

SEQ ID NO: 6818 - protein, 43 aa, Artificial Sequence
  Description of Artificial Sequence: Synthetic antibody
ITADKSTSTAYMELSSLRSEDTAVYYCARDRPGAAAGDYWGQG

SEQ ID NO: 6819 - DNA, 129 bp, Artificial Sequence
  Description of Artificial Sequence: Synthetic antibody
attaccgcgcacaaatccacgaccacagcctacatggagctgagcagcctgagatctgaggacacggccgtgtattactgtgcgagagatcgacccggggcagcagctggtgactactggggccaggga

SEQ ID NO: 6820 - protein, 43 aa, Artificial Sequence
  Description of Artificial Sequence: Synthetic antibody
ITAHKSTTTAYMELSSLRSEDTAVYYCARDRPGAAAGDYWGQG

SEQ ID NO: 6821 - protein, 21 aa, Artificial Sequence
  Description of Artificial Sequence: Synthetic antibody
CARDEYDYVWGSYRPHYFDYW

SEQ ID NO: 6822 - DNA, 129 bp, Artificial Sequence
  Description of Artificial Sequence: Synthetic antibody
tgcacagcctacttggagctgaggagcctgagatctgacgacacggccgtgtattactgtgcgagagacgagtatgattacgtttgggggagttatcgtcctcactactttgactactggggccaggga

SEQ ID NO: 6823 - protein, 43 aa, Artificial Sequence
  Description of Artificial Sequence: Synthetic antibody
CTAYLELRSLRSDDTAVYYCARDEYDYVWGSYRPHYFDYWGQG

SEQ ID NO: 6824 - DNA, 129 bp, Artificial Sequence
  Description of Artificial Sequence: Synthetic antibody
agcacagcctacatggagctgaggagcctgagatctgacgacacggccgtgtattactgtgcgagagacgagtatgattacgtttgggggagttatcgtcctcactactttgactactggggccaggga

SEQ ID NO: 6825 - protein, 43 aa, Artificial Sequence
  Description of Artificial Sequence: Synthetic antibody
STAYMELRSLRSDDTAVYYCARDEYDYVWGSYRPHYFDYWGQG

SEQ ID NO: 6826 - protein, 16 aa, Artificial Sequence
  Description of Artificial Sequence: Synthetic antibody
CARAGGAWGIVGLDYW

SEQ ID NO: 6827 - DNA, 129 bp, Artificial Sequence
  Description of Artificial Sequence: Synthetic antibody
tgggacacatccgcgagcacagcctacatggagctgagcagcctgagatctgaagacacggctgtgtattactgtgcgagagcgggcggggcctggggtattgtagggctggactactggggccaggga

SEQ ID NO: 6828 - protein, 43 aa, Artificial Sequence
  Description of Artificial Sequence: Synthetic antibody
WDTSASTAYMELSSLRSEDTAVYYCARAGGAWGIVGLDYWGQG

SEQ ID NO: 6829 - DNA, 129 bp, Artificial Sequence
  Description of Artificial Sequence: Synthetic antibody
agggacacatccgcgagcacagcctacatggagctgagcagcctgagatctgaagacacggctgtgtattactgtgcgagagcgggcggggcctggggtattgtagggctggactactggggccaggga

SEQ ID NO: 6830 - protein, 43 aa, Artificial Sequence
  Description of Artificial Sequence: Synthetic antibody
RDTSASTAYMELSSLRSEDTAVYYCARAGGAWGIVGLDYWGQG

SEQ ID NO: 6831 - protein, 22 aa, Artificial Sequence
  Description of Artificial Sequence: Synthetic antibody
CAKVHDSSGYYWVYFYYGMDVW

SEQ ID NO: 6832 - DNA, 129 bp, Artificial Sequence
  Description of Artificial Sequence: Synthetic antibody
tcgatgtatctgcaaatgaacagcctgagagccgaggacacggccgtatattactgtgcgaaggtccacgatagtagtggttattattgggtctacttctactacggtatggacgtctggggccaaggg

SEQ ID NO: 6833 - protein, 43 aa, Artificial Sequence
  Description of Artificial Sequence: Synthetic antibody
SMYLQMNSLRAEDTAVYYCAKVHDSSGYYWVYFYYGMDVWGQG

SEQ ID NO: 6834 - DNA, 129 bp, Artificial Sequence
  Description of Artificial Sequence: Synthetic antibody
acgctgtatctgcaaatgaacagcctgagagccgaggacacggccgtatattactgtgcgaaggtccacgatagtagtggttattattgggtctacttctactacggtatggacgtctggggccaaggg

SEQ ID NO: 6835 - protein, 43 aa, Artificial Sequence
  Description of Artificial Sequence: Synthetic antibody
TLYLQMNSLRAEDTAVYYCAKVHDSSGYYWVYFYYGMDVWGQG

SEQ ID NO: 6836 - protein, 21 aa, Artificial Sequence
  Description of Artificial Sequence: Synthetic antibody
CARGPVDSGYDWRGPGAFDIW

SEQ ID NO: 6837 - DNA, 129 bp, Artificial Sequence
  Description of Artificial Sequence: Synthetic antibody
agcactgcctacatggagctgaggagcctgagatctgacgacacggccgtgtattactgtgcgagagggccggttgatagtggctacgattggaggggcccgggcgcttttgatatctggggccaaggg

SEQ ID NO: 6838 - protein, 43 aa, Artificial Sequence
  Description of Artificial Sequence: Synthetic antibody
STAYMELRSLRSDDTAVYYCARGPVDSGYDWRGPGAFDIWGQG

SEQ ID NO: 6839 - DNA, 129 bp, Artificial Sequence
  Description of Artificial Sequence: Synthetic antibody
agcacagcctacatggagctgaggagcctgagatctgacgacacggccgtgtattactgtgcgagagggccggttgatagtggctacgattggaggggcccgggcgcttttgatatctggggccaaggg

SEQ ID NO: 6840 - protein, 18 aa, Artificial Sequence
  Description of Artificial Sequence: Synthetic antibody
CAKGGGYYYDNSGYVGYW

SEQ ID NO: 6841 - DNA, 129 bp, Artificial Sequence
  Description of Artificial Sequence: Synthetic antibody
acttccaagaacacgctgtttctgcaaatgagcagcctgagagtcgaggacacggccgtatattactgtgcgaaggggggcgggtattactatgataatagtggttatgttggctactggggccaggga

SEQ ID NO: 6842 - protein, 43 aa, Artificial Sequence
  Description of Artificial Sequence: Synthetic antibody
TSKNTLFLQMSSLRVEDTAVYYCAKGGGYYYDNSGYVGYWGQG

SEQ ID NO: 6843 - DNA, 129 bp, Artificial Sequence
  Description of Artificial Sequence: Synthetic antibody
aattccaagaacacgctgtttctgcaaatgagcagcctgagagtcgaggacacggccgtatattactgtgcgaaggggggcgggtattactatgataatagtggttatgttggctactggggccaggga

SEQ ID NO: 6844 - protein, 43 aa, Artificial Sequence
  Description of Artificial Sequence: Synthetic antibody
NSKNTLFLQMSSLRVEDTAVYYCAKGGGYYYDNSGYVGYWGQG

SEQ ID NO: 6845 - protein, 16 aa, Artificial Sequence
  Description of Artificial Sequence: Synthetic antibody
CTHNLGGWDGQYSDYW

SEQ ID NO: 6846 - DNA, 129 bp, Artificial Sequence
  Description of Artificial Sequence: Synthetic antibody
aaggacacctccaaaaaccaggtggtccttacaatgaccaacatggaccctgtggacacagccacatatttctgtacacacaatcttggaggctgggatgggcagtactctgactactggggccaggga

SEQ ID NO: 6847 - protein, 43 aa, Artificial Sequence
  Description of Artificial Sequence: Synthetic antibody
KDTSKNQVVLTMTNMDPVDTATYFCTHNLGGWDGQYSDYWGQG

SEQ ID NO: 6848 - DNA, 129 bp, Artificial Sequence
  Description of Artificial Sequence: Synthetic antibody
aaggacacctccaaaaaccaggtggtccttacaatgaccaacatggaccctgtagacacagccacatatttctgtacacacaatcttggaggctgggatgggcagtactctgactactggggccaggga

SEQ ID NO: 6849 - protein, 13 aa, Artificial Sequence
  Description of Artificial Sequence: Synthetic antibody
CARDRYGSGLDYW

SEQ ID NO: 6850 - DNA, 129 bp, Artificial Sequence
  Description of Artificial Sequence: Synthetic antibody
accatctccagagacaacgccaagaacacgctgtatctgcaaatgaacagtctgagagccgaggacacggctgtgtattactgtgcaagagatcgttatggttcgggcctcgactactggggccagggg

SEQ ID NO: 6851 - protein, 43 aa, Artificial Sequence
  Description of Artificial Sequence: Synthetic antibody
TISRDNAKNTLYLQMNSLRAEDTAVYYCARDRYGSGLDYWGQG

SEQ ID NO: 6852 - DNA, 129 bp, Artificial Sequence
  Description of Artificial Sequence: Synthetic antibody
accatctccagagacaacgccaagaacacgctgtatctgcaaatgaacagtctgagagccgaggacacggctgtgtattactgtgcaagagatcgttatggttcgggcctcgactactggggccaggga

SEQ ID NO: 6853 - protein, 22 aa, Artificial Sequence
  Description of Artificial Sequence: Synthetic antibody
CAKDRREQQLDLRYYYYGMDVW

SEQ ID NO: 6854 - DNA, 129 bp, Artificial Sequence
  Description of Artificial Sequence: Synthetic antibody
tcgatgtatctgcaaatgaacagcctgagagccgaggacacggctgtgtattactgtgcgaaagatcgaagggagcagcagctggaccttcggtactactactacggtatggacgtctggggccaaggg

SEQ ID NO: 6855 - protein, 43 aa, Artificial Sequence
  Description of Artificial Sequence: Synthetic antibody
SMYLQMNSLRAEDTAVYYCAKDRREQQLDLRYYYYGMDVWGQG

SEQ ID NO: 6856 - DNA, 129 bp, Artificial Sequence
  Description of Artificial Sequence: Synthetic antibody
acgctgtatctgcaaatgaacagcctgagagccgaggacacggctgtgtattactgtgcgaaagatcgaagggagcagcagctggaccttcggtactactactacggtatggacgtctggggccaaggg

SEQ ID NO: 6857 - protein, 43 aa, Artificial Sequence
  Description of Artificial Sequence: Synthetic antibody
TLYLQMNSLRAEDTAVYYCAKDRREQQLDLRYYYYGMDVWGQG

SEQ ID NO: 6858 - protein, 14 aa, Artificial Sequence
  Description of Artificial Sequence: Synthetic antibody
CAHSSTILYYFDYW

SEQ ID NO: 6859 - DNA, 129 bp, Artificial Sequence
  Description of Artificial Sequence: Synthetic antibody
catcaccaaggacacctccaaaaccaggtggtccttacaatgaccaacatggaccctgtggacacagccacatattactgtgcacacagttctacgatattatattactttgactactggggccaggga

SEQ ID NO: 6860 - protein, 43 aa, Artificial Sequence
  Description of Artificial Sequence: Synthetic antibody
HHQGHLQNQVVLTMTNMDPVDTATYYCAHSSTILYYFDYWGQG

SEQ ID NO: 6861 - DNA, 129 bp, Artificial Sequence
  Description of Artificial Sequence: Synthetic antibody
atcaccaaggacacctccaaaaaccaggtggtccttacaatgaccaacatggaccctgtggacacagccacatattactgtgcacacagttctacgatattatattactttgactactggggccaggga

SEQ ID NO: 6862 - protein, 43 aa, Artificial Sequence
  Description of Artificial Sequence: Synthetic antibody
ITKDTSKNQVVLTMTNMDPVDTATYYCAHSSTILYYFDYWGQG

SEQ ID NO: 6863 - protein, 23 aa, Artificial Sequence
  Description of Artificial Sequence: Synthetic antibody
CARDFRHYGDYGKGVGRYWFDPW

SEQ ID NO: 6864 - DNA, 129 bp, Artificial Sequence
  Description of Artificial Sequence: Synthetic antibody
gcctacatggagctgagcagcctgagatctgaggacacggccgtgtattactgtgcgagagacttccgacactacggtgactatgggaagggggtcgggcggtactggttcgacccctggggccaggga

SEQ ID NO: 6865 - protein, 43 aa, Artificial Sequence
  Description of Artificial Sequence: Synthetic antibody
AYMELSSLRSEDTAVYYCARDFRHYGDYGKGVGRYWFDPWGQG

SEQ ID NO: 6866 - protein, 17 aa, Artificial Sequence
  Description of Artificial Sequence: Synthetic antibody
CVRTKTMMPSGTYFYYW

SEQ ID NO: 6867 - DNA, 129 bp, Artificial Sequence
  Description of Artificial Sequence: Synthetic antibody
gacatttcactcagtaccgcctacctgcactggaacagcctgcggtcctccgacaccggcatttatttctgtgtgcgaacgaagactatgatgccttcggggacttatttctactactggggccaggga

SEQ ID NO: 6868 - protein, 43 aa, Artificial Sequence
  Description of Artificial Sequence: Synthetic antibody
DISLSTAYLHWNSLRSSDTGIYFCVRTKTMMPSGTYFYYWGQG

SEQ ID NO: 6869 - DNA, 129 bp, Artificial Sequence
  Description of Artificial Sequence: Synthetic antibody
gacatttcactcagtaccgcctacctgcactggaacaccctgcggtcctccgacaccggcatttatttctgtgtgcgaacgaagactatgatgccttcggggacttatttctactactggggccaggga

SEQ ID NO: 6870 - protein, 43 aa, Artificial Sequence
  Description of Artificial Sequence: Synthetic antibody
DISLSTAYLHWNTLRSSDTGIYFCVRTKTMMPSGTYFYYWGQG

SEQ ID NO: 6871 - protein, 20 aa, Artificial Sequence
  Description of Artificial Sequence: Synthetic antibody
CAGVDGDEHPYYYYYGMDVW

SEQ ID NO: 6872 - DNA, 129 bp, Artificial Sequence
  Description of Artificial Sequence: Synthetic antibody
aagaacacgctgtatcttcaaatgaacagcctgagagccgaggacacggccgtgtattactgcgccggggtggacggtgacgaacacccctactactactactacggtatggacgtctggggccaaggg

SEQ ID NO: 6873 - protein, 43 aa, Artificial Sequence
  Description of Artificial Sequence: Synthetic antibody
KNTLYLQMNSLRAEDTAVYYCAGVDGDEHPYYYYYGMDVWGQG

SEQ ID NO: 6874 - DNA, 129 bp, Artificial Sequence
  Description of Artificial Sequence: Synthetic antibody
aacaacacgctgtatctacaaatgaacagcctgagagccgaggacacggccgtgtattactgcgccggggtggacggtgacgaacacccctactactactactacggtatggacgtctggggccaaggg

SEQ ID NO: 6875 - protein, 43 aa, Artificial Sequence
  Description of Artificial Sequence: Synthetic antibody
NNTLYLQMNSLRAEDTAVYYCAGVDGDEHPYYYYYGMDVWGQG

SEQ ID NO: 6876 - protein, 25 aa, Artificial Sequence
  Description of Artificial Sequence: Synthetic antibody
CARGRLRVGYYYGSGSYYLASFAYW

SEQ ID NO: 6877 - DNA, 129 bp, Artificial Sequence
  Description of Artificial Sequence: Synthetic antibody
ttggagctgaggagcctgagatctgacgacacggccgtgtattactgtgcgagaggtcgtttaagagtggggtattactatggttcggggagttattatctggcctcctttgcctactggggccaggga

SEQ ID NO: 6878 - protein, 43 aa, Artificial Sequence
  Description of Artificial Sequence: Synthetic antibody
LELRSLRSDDTAVYYCARGRLRVGYYYGSGSYYLASFAYWGQG

SEQ ID NO: 6879 - DNA, 129 bp, Artificial Sequence
  Description of Artificial Sequence: Synthetic antibody
atggagctgaggagcctgagatctgacgacacggccgtgtattactgtgcgagaggtcgtttaagagtggggtattactatggttcggggagttattatctggcctcctttgcctactggggccaggga

SEQ ID NO: 6880 - protein, 43 aa, Artificial Sequence
  Description of Artificial Sequence: Synthetic antibody
MELRSLRSDDTAVYYCARGRLRVGYYYGSGSYYLASFAYWGQG

SEQ ID NO: 6881 - protein, 22 aa, Artificial Sequence
  Description of Artificial Sequence: Synthetic antibody
CARGPRLRGYSSSSYPNWFDPW

SEQ ID NO: 6882 - DNA, 129 bp, Artificial Sequence
  Description of Artificial Sequence: Synthetic antibody
acggcatatctgcagatcagcagcctaaaggctgaggacactgccgtgtattactgtgcgagaggcccgaggcttagggggtatagcagctcgtcctaccctaactggttcgacccctggggccgggga

SEQ ID NO: 6883 - protein, 43 aa, Artificial Sequence
  Description of Artificial Sequence: Synthetic antibody
TAYLQISSLKAEDTAVYYCARGPRLRGYSSSSYPNWFDPWGRG

SEQ ID NO: 6884 - DNA, 129 bp, Artificial Sequence
  Description of Artificial Sequence: Synthetic antibody
acggcatatctgcagatcagcagcctaaaggctgaggacactgccgtgtattactgtgcgagaggcccgaggcttagggggtatagcagctcgtcctaccctaactggttcgacccctggggccaggga

SEQ ID NO: 6885 - protein, 43 aa, Artificial Sequence
  Description of Artificial Sequence: Synthetic antibody
TAYLQISSLKAEDTAVYYCARGPRLRGYSSSSYPNWFDPWGQG

SEQ ID NO: 6886 - protein, 19 aa, Artificial Sequence
  Description of Artificial Sequence: Synthetic antibody
CAKDYYYDSSGYVDAFDIW

SEQ ID NO: 6887 - DNA, 129 bp, Artificial Sequence
  Description of Artificial Sequence: Synthetic antibody
tccaagaactcgatgtatctgcaaatgaacagcctgagagccgaggacacggccgtatattactgtgcgaaagattactactatgatagtagtggttacgttgatgcttttgatatctggggccaaggg

SEQ ID NO: 6888 - protein, 43 aa, Artificial Sequence
  Description of Artificial Sequence: Synthetic antibody
SKNSMYLQMNSLRAEDTAVYYCAKDYYYDSSGYVDAFDIWGQG

SEQ ID NO: 6889 - DNA, 129 bp, Artificial Sequence
  Description of Artificial Sequence: Synthetic antibody
tccaagaacacgctgtatctgcaaatgaacagcctgagagccgaggacacggccgtatattactgtgcgaaagattactactatgatagtagtggttacgttgatgcttttgatatctggggccaaggg

SEQ ID NO: 6890 - protein, 43 aa, Artificial Sequence
  Description of Artificial Sequence: Synthetic antibody
SKNTLYLQMNSLRAEDTAVYYCAKDYYYDSSGYVDAFDIWGQG

SEQ ID NO: 6891 - protein, 19 aa, Artificial Sequence
  Description of Artificial Sequence: Synthetic antibody
CTRTFGTPASYYYYGMDVW

SEQ ID NO: 6892 - DNA, 129 bp, Artificial Sequence
  Description of Artificial Sequence: Synthetic antibody
tcaaagaacacggcgtatctgcaaatgaacagcctgaaaaccgaggacacggccgtgtattactgtactaggacgttcgggacccctgcctcctactactactacggtatggacgtctggggccaaggg

SEQ ID NO: 6893 - protein, 43 aa, Artificial Sequence
  Description of Artificial Sequence: Synthetic antibody
SKNTAYLQMNSLKTEDTAVYYCTRTFGTPASYYYYGMDVWGQG

SEQ ID NO: 6894 - DNA, 129 bp, Artificial Sequence
  Description of Artificial Sequence: Synthetic antibody
caaagaaccacggcgtatctgcaaatgaacagcctgaaaaccgaggacacggccgtgtattactgtactaggacgttcgggacccctgcctcctactactactacggtatggacgtctggggccaaggg

SEQ ID NO: 6895 - protein, 43 aa, Artificial Sequence
  Description of Artificial Sequence: Synthetic antibody
QRTTAYLQMNSLKTEDTAVYYCTRTFGTPASYYYYGMDVWGQG

SEQ ID NO: 6896 - protein, 18 aa, Artificial Sequence
  Description of Artificial Sequence: Synthetic antibody
CARDLMVRGVSLDAFDIW

SEQ ID NO: 6897 - DNA, 129 bp, Artificial Sequence
  Description of Artificial Sequence: Synthetic antibody
aaatccacgtgcacagcctacatggagctgagcagcctgagatctgaggacacggccgtgtattactgtgcgagagatctaatggttcggggagtcagtttagatgcttttgatatctggggccaaggg

SEQ ID NO: 6898 - protein, 43 aa, Artificial Sequence
  Description of Artificial Sequence: Synthetic antibody
KSTCTAYMELSSLRSEDTAVYYCARDLMVRGVSLDAFDIWGQG

SEQ ID NO: 6899 - DNA, 129 bp, Artificial Sequence
  Description of Artificial Sequence: Synthetic antibody
aaatccacgagcacagcctacatggagctgagcagcctgagatctgaggacacggccgtgtattactgtgcgagagatctaatggttcggggagtcagtttagatgcttttgatatctggggccaaggg

SEQ ID NO: 6900 - protein, 43 aa, Artificial Sequence
  Description of Artificial Sequence: Synthetic antibody
KSTSTAYMELSSLRSEDTAVYYCARDLMVRGVSLDAFDIWGQG

SEQ ID NO: 6901 - protein, 19 aa, Artificial Sequence
  Description of Artificial Sequence: Synthetic antibody
CAKYNYIWGSYRYKYFDYW

SEQ ID NO: 6902 - DNA, 129 bp, Artificial Sequence
  Description of Artificial Sequence: Synthetic antibody
tccaagaacacgctgtatctgcaaatgaacagcctgagagccgaggacacggccgtatattactgtgcgaaatacaattacatttgggggagttatcgctataagtactttgactactggggccaggga

SEQ ID NO: 6903 - protein, 43 aa, Artificial Sequence
  Description of Artificial Sequence: Synthetic antibody
SKNTLYLQMNSLRAEDTAVYYCAKYNYIWGSYRYKYFDYWGQG

SEQ ID NO: 6904 - DNA, 129 bp, Artificial Sequence
  Description of Artificial Sequence: Synthetic antibody
tccaagaacacgctgtatctgcaaatgaacagcctgaaagccgaggacacggccgtatattactgtgcgaaatacaattacatttgggggagttatcgctataagtactttgactactggggccaggga

SEQ ID NO: 6905 - protein, 43 aa, Artificial Sequence
  Description of Artificial Sequence: Synthetic antibody
SKNTLYLQMNSLKAEDTAVYYCAKYNYIWGSYRYKYFDYWGQG

SEQ ID NO: 6906 - protein, 21 aa, Artificial Sequence
  Description of Artificial Sequence: Synthetic antibody
CARRTVYYDILTGSKADLDYW

SEQ ID NO: 6907 - DNA, 129 bp, Artificial Sequence
  Description of Artificial Sequence: Synthetic antibody
tgcacagcctacttggagctgaggagcctgagatctgacgacacggccgtgtattactgtgcgagaaggactgtgtattacgatattttgactggttcgaaagccgaccttgactactggggccaggga

SEQ ID NO: 6908 - protein, 43 aa, Artificial Sequence
  Description of Artificial Sequence: Synthetic antibody
CTAYLELRSLRSDDTAVYYCARRTVYYDILTGSKADLDYWGQG

SEQ ID NO: 6909 - DNA, 129 bp, Artificial Sequence
  Description of Artificial Sequence: Synthetic antibody
agcacagcctacatggagctgaggagcctgagatctgacgacacggccgtgtattactgtgcgagaaggactgtgtattacgatattttgactggttcgaaagccgaccttgactactggggccaggga

SEQ ID NO: 6910 - protein, 43 aa, Artificial Sequence
  Description of Artificial Sequence: Synthetic antibody
STAYMELRSLRSDDTAVYYCARRTVYYDILTGSKADLDYWGQG

SEQ ID NO: 6911 - protein, 20 aa, Artificial Sequence
  Description of Artificial Sequence: Synthetic antibody
CAKDGIAVAGTYYYYGMDVW

SEQ ID NO: 6912 - DNA, 129 bp, Artificial Sequence
  Description of Artificial Sequence: Synthetic antibody
aagaatacgctgtatctgcaaatgaacagcctgagagccgaggacatggccgtatattactgtgcgaaagatggcatagcagtggctggcacttactactactacggtatggacgtctggggccaaggg

SEQ ID NO: 6913 - protein, 43 aa, Artificial Sequence
  Description of Artificial Sequence: Synthetic antibody
KNTLYLQMNSLRAEDMAVYYCAKDGIAVAGTYYYYGMDVWGQG

SEQ ID NO: 6914 - DNA, 129 bp, Artificial Sequence
  Description of Artificial Sequence: Synthetic antibody
aagaacacgctgtatctgcaaatgaacagcctgagagccgaggacacggccgtatattactgtgcgaaagatggcatagcagtggctggcacttactactactacggtatggacgtctggggccaaggg

SEQ ID NO: 6915 - protein, 43 aa, Artificial Sequence
  Description of Artificial Sequence: Synthetic antibody
KNTLYLQMNSLRAEDTAVYYCAKDGIAVAGTYYYYGMDVWGQG

SEQ ID NO: 6916 - protein, 22 aa, Artificial Sequence
  Description of Artificial Sequence: Synthetic antibody
CAKDSHLAPRDPGSYAGIFDYW

SEQ ID NO: 6917 - DNA, 129 bp, Artificial Sequence
  Description of Artificial Sequence: Synthetic antibody
tcgatgtatctgcaaatgaacagcctgagagccgaggacacggccgtatattactgtgcgaaagattctcatctcgcgccccgggatccggggagctacgcagggatctttgactactggggccaggga

SEQ ID NO: 6918 - protein, 43 aa, Artificial Sequence
  Description of Artificial Sequence: Synthetic antibody
SMYLQMNSLRAEDTAVYYCAKDSHLAPRDPGSYAGIFDYWGQG

SEQ ID NO: 6919 - DNA, 129 bp, Artificial Sequence
  Description of Artificial Sequence: Synthetic antibody
acgctgtatctgcaaatgaacagcctgagagccgaggacacggccgtatattactgtgcgaaagattctcatctcgcgccccgggatccggggagctacgcagggatctttgactactggggccaggga

SEQ ID NO: 6920 - protein, 43 aa, Artificial Sequence
  Description of Artificial Sequence: Synthetic antibody
TLYLQMNSLRAEDTAVYYCAKDSHLAPRDPGSYAGIFDYWGQG

SEQ ID NO: 6921 - protein, 20 aa, Artificial Sequence
  Description of Artificial Sequence: Synthetic antibody
CARGDMGLWFGELRYGMDVW

SEQ ID NO: 6922 - DNA, 129 bp, Artificial Sequence
  Description of Artificial Sequence: Synthetic antibody
aagaaccagttctccctgaagctgagctctgtgactgccgcggacacggccgtgtattactgtgcgagaggcgacatgggcctatggttcggggagttacgatacggtatggacgtctggggccaaggg

SEQ ID NO: 6923 - protein, 43 aa, Artificial Sequence
  Description of Artificial Sequence: Synthetic antibody
KNQFSLKLSSVTAADTAVYYCARGDMGLWFGELRYGMDVWGQG

SEQ ID NO: 6924 - DNA, 129 bp, Artificial Sequence
  Description of Artificial Sequence: Synthetic antibody
aacaaccagttctccctgacgctgagctctgtgactgccgcggacacggccgtgtattactgtgcgagaggcgacatgggcctatggttcggggagttacgatacggtatggacgtctggggccaaggg

SEQ ID NO: 6925 - protein, 43 aa, Artificial Sequence
  Description of Artificial Sequence: Synthetic antibody
NNQFSLTLSSVTAADTAVYYCARGDMGLWFGELRYGMDVWGQG

SEQ ID NO: 6926 - protein, 11 aa, Artificial Sequence
  Description of Artificial Sequence: Synthetic antibody
CATVEASGSPW

SEQ ID NO: 6927 - DNA, 129 bp, Artificial Sequence
  Description of Artificial Sequence: Synthetic antibody
agagtcaccataaccgcggacacgtctacagacacagcctacatggagctgagcagcctgagatctgaggacacggccgtatattactgtgcaacagtggaggctagtgggagcccttggggccaggga

SEQ ID NO: 6928 - protein, 43 aa, Artificial Sequence
  Description of Artificial Sequence: Synthetic antibody
RVTITADTSTDTAYMELSSLRSEDTAVYYCATVEASGSPWGQG

SEQ ID NO: 6929 - DNA, 129 bp, Artificial Sequence
  Description of Artificial Sequence: Synthetic antibody
agagacaccataaccgcgcacacgtcaacagacacagcctacatggagctgagcagccttagatctgaggacacggccgtatattactgtgcaacagtggaggctagtgggagcccttggggccaggga

SEQ ID NO: 6930 - protein, 43 aa, Artificial Sequence
  Description of Artificial Sequence: Synthetic antibody
RDTITAHTSTDTAYMELSSLRSEDTAVYYCATVEASGSPWGQG

SEQ ID NO: 6931 - protein, 20 aa, Artificial Sequence
  Description of Artificial Sequence: Synthetic antibody
CARESLTTIAAAGENYFDYW

SEQ ID NO: 6932 - DNA, 129 bp, Artificial Sequence
  Description of Artificial Sequence: Synthetic antibody
tcgagcacagcctacatggagctgaggagcctgagatctgacgacacggccgtgtattactgtgcgagagagagcctcacgacaatagcagcagctggggaaaactactttgactactggggccaggga

SEQ ID NO: 6933 - protein, 43 aa, Artificial Sequence
  Description of Artificial Sequence: Synthetic antibody
SSTAYMELRSLRSDDTAVYYCARESLTTIAAAGENYFDYWGQG

SEQ ID NO: 6934 - DNA, 129 bp, Artificial Sequence
  Description of Artificial Sequence: Synthetic antibody
acgagcacagcctacatggagctgaggagcctgagatctgacgacacggccgtgtattactgtgcgagagagagcctcacgacaatagcagcagctggggaaaactactttgactactggggccaggga

SEQ ID NO: 6935 - protein, 43 aa, Artificial Sequence
  Description of Artificial Sequence: Synthetic antibody
TSTAYMELRSLRSDDTAVYYCARESLTTIAAAGENYFDYWGQG

SEQ ID NO: 6936 - protein, 25 aa, Artificial Sequence
  Description of Artificial Sequence: Synthetic antibody
CARDGEYSSGWTGTGSYYYYGMDVW

SEQ ID NO: 6937 - DNA, 129 bp, Artificial Sequence
  Description of Artificial Sequence: Synthetic antibody
ttggagctgaggagcctgagatctgacgacacggccgtgtattactgtgcgagagacggggagtatagcagtggctggacaggaactggatcctactactactacggtatggacgtctggggccaaggg

SEQ ID NO: 6938 - protein, 43 aa, Artificial Sequence
  Description of Artificial Sequence: Synthetic antibody
LELRSLRSDDTAVYYCARDGEYSSGWTGTGSYYYYGMDVWGQG

SEQ ID NO: 6939 - DNA, 129 bp, Artificial Sequence
  Description of Artificial Sequence: Synthetic antibody
atggagctgaggagcctgagatctgacgacacggccgtgtattactgtgcgagagacggggagtatagcagtggctggacaggaactggatcctactactactacggtatggacgtctggggccaaggg

SEQ ID NO: 6940 - protein, 43 aa, Artificial Sequence
  Description of Artificial Sequence: Synthetic antibody
MELRSLRSDDTAVYYCARDGEYSSGWTGTGSYYYYGMDVWGQG

SEQ ID NO: 6941 - protein, 17 aa, Artificial Sequence
  Description of Artificial Sequence: Synthetic antibody
CAKDTSWATAETYFDYW

SEQ ID NO: 6942 - DNA, 129 bp, Artificial Sequence
  Description of Artificial Sequence: Synthetic antibody
gacaattccaagaacacgctgtatctgcaaatgaacagcctgagagccgaggacacggccgtatattattgtgcgaaagatacgtcctgggctacagccgagacctactttgactactggggccaggga

SEQ ID NO: 6943 - protein, 43 aa, Artificial Sequence
  Description of Artificial Sequence: Synthetic antibody
DNSKNTLYLQMNSLRAEDTAVYYCAKDTSWATAETYFDYWGQG

SEQ ID NO: 6944 - DNA, 129 bp, Artificial Sequence
  Description of Artificial Sequence: Synthetic antibody
cacaattccaacaacacgctgtatctgcaaatgaacagcctgagagccgaggacacggccgtatattattgtgcgaaagatacgtcctgggctacagccgagacctactttgactactggggccaggga

SEQ ID NO: 6945 - protein, 43 aa, Artificial Sequence
  Description of Artificial Sequence: Synthetic antibody
HNSNNTLYLQMNSLRAEDTAVYYCAKDTSWATAETYFDYWGQG

SEQ ID NO: 6946 - protein, 25 aa, Artificial Sequence
  Description of Artificial Sequence: Synthetic antibody
CARDRQETYSSSWYDYPVFYGMDVW

SEQ ID NO: 6947 - DNA, 129 bp, Artificial Sequence
  Description of Artificial Sequence: Synthetic antibody
cttcaaatgaacagcctgagagccgaggacacggccgtgtattactgtgcgagagatcgtcaagaaacgtatagcagcagctggtacgattacccggttttctacggtatggacgtctggggccaaggg

SEQ ID NO: 6948 - protein, 43 aa, Artificial Sequence
  Description of Artificial Sequence: Synthetic antibody
LQMNSLRAEDTAVYYCARDRQETYSSSWYDYPVFYGMDVWGQG

SEQ ID NO: 6949 - DNA, 129 bp, Artificial Sequence
  Description of Artificial Sequence: Synthetic antibody
cttaaaatgaaccgcctgagagccgaggacacggccgtgtattactgtgcgagagatcgtcaagaaacgtatagcagcagctggtacgattacccggttttctacggtatggacgtctggggccaaggg

SEQ ID NO: 6950 - protein, 43 aa, Artificial Sequence
  Description of Artificial Sequence: Synthetic antibody
LKMNRLRAEDTAVYYCARDRQETYSSSWYDYPVFYGMDVWGQG

SEQ ID NO: 6951 - protein, 25 aa, Artificial Sequence
  Description of Artificial Sequence: Synthetic antibody
CAREVNDDFWSGYFTYYYYYGMDVW

SEQ ID NO: 6952 - DNA, 129 bp, Artificial Sequence
  Description of Artificial Sequence: Synthetic antibody
ttggagctgaggagcctgagatctgacgacacggccgtgtattactgtgcgagagaagtcaatgacgatttttggagtggttactttacttactactactactacggtatggacgtctggggccaaggg

SEQ ID NO: 6953 - protein, 43 aa, Artificial Sequence
  Description of Artificial Sequence: Synthetic antibody
LELRSLRSDDTAVYYCAREVNDDFWSGYFTYYYYYGMDVWGQG

SEQ ID NO: 6954 - DNA, 129 bp, Artificial Sequence
  Description of Artificial Sequence: Synthetic antibody
atggagctgaggagcctgagatctgacgacacggccgtgtattactgtgcgagagaagtcaatgacgatttttggagtggttactttacttactactactactacggtatggacgtctggggccaaggg

SEQ ID NO: 6955 - protein, 43 aa, Artificial Sequence
  Description of Artificial Sequence: Synthetic antibody
MELRSLRSDDTAVYYCAREVNDDFWSGYFTYYYYYGMDVWGQG

SEQ ID NO: 6956 - protein, 17 aa, Artificial Sequence
  Description of Artificial Sequence: Synthetic antibody
CARAKAAADRTSAFDIC

SEQ ID NO: 6957 - DNA, 129 bp, Artificial Sequence
  Description of Artificial Sequence: Synthetic antibody
gacacgtccatcagcgcagcctacatggagctgagcaggctgagatctgacgacacggccgtgtattactgtgcgagggctaaagcagcagctgaccggactagtgcttttgatatctgtggccaaggg

SEQ ID NO: 6958 - protein, 43 aa, Artificial Sequence
  Description of Artificial Sequence: Synthetic antibody
DTSISAAYMELSRLRSDDTAVYYCARAKAAADRTSAFDICGQG

SEQ ID NO: 6959 - DNA, 129 bp, Artificial Sequence
  Description of Artificial Sequence: Synthetic antibody
gacacgtccatcagcacagcctacatggagctgagcaggctgagatctgacgacacggccgtgtattactgtgcgagggctaaagcagcagctgaccggactagtgcttttgatatctgtggccaaggg

SEQ ID NO: 6960 - protein, 43 aa, Artificial Sequence
  Description of Artificial Sequence: Synthetic antibody
DTSISTAYMELSRLRSDDTAVYYCARAKAAADRTSAFDICGQG

SEQ ID NO: 6961 - protein, 17 aa, Artificial Sequence
  Description of Artificial Sequence: Synthetic antibody
CAKVMVVAFHRDAFDIW

SEQ ID NO: 6962 - DNA, 129 bp, Artificial Sequence
  Description of Artificial Sequence: Synthetic antibody
gacaattccaagaacacgctgtatctgcaaatgaacagcctgagagccgaggacacggccgtatattactgtgcgaaagtgatggtggtagctttccatagggatgcttttgatatctggggccaaggg

SEQ ID NO: 6963 - protein, 43 aa, Artificial Sequence
  Description of Artificial Sequence: Synthetic antibody
DNSKNTLYLQMNSLRAEDTAVYYCAKVMVVAFHRDAFDIWGQG

SEQ ID NO: 6964 - DNA, 129 bp, Artificial Sequence
  Description of Artificial Sequence: Synthetic antibody
cacaattccaacaacacgctgtatctgcaaatgaacagcctgagagccgaggacacggccgtatattactgtgcgaaagtgatggtggtagctttccatagggatgcttttgatatctggggccaaggg

SEQ ID NO: 6965 - protein, 43 aa, Artificial Sequence
  Description of Artificial Sequence: Synthetic antibody
HNSNNTLYLQMNSLRAEDTAVYYCAKVMVVAFHRDAFDIWGQG

SEQ ID NO: 6966 - protein, 19 aa, Artificial Sequence
  Description of Artificial Sequence: Synthetic antibody
CAKDFPVYRAPRPNAFDIW

SEQ ID NO: 6967 - DNA, 129 bp, Artificial Sequence
  Description of Artificial Sequence: Synthetic antibody
tccaagaacacgctgtatctgcagatgagcagcctgagagccgaggacacggccgtatattactgtgcgaaagattttcccgtttatcgcgcaccccgcccaaatgcttttgatatctggggccaaggg

SEQ ID NO: 6968 - protein, 43 aa, Artificial Sequence
  Description of Artificial Sequence: Synthetic antibody
SKNTLYLQMSSLRAEDTAVYYCAKDFPVYRAPRPNAFDIWGQG

SEQ ID NO: 6969 - DNA, 129 bp, Artificial Sequence
  Description of Artificial Sequence: Synthetic antibody
tccaagaacacgctgtatctgcaaatgaacagcctgagagccgaggacacggccgtatattactgtgcgaaagattttcccgtttatcgcgcaccccgcccaaatgcttttgatatctggggccaaggg

SEQ ID NO: 6970 - protein, 43 aa, Artificial Sequence
  Description of Artificial Sequence: Synthetic antibody
SKNTLYLQMNSLRAEDTAVYYCAKDFPVYRAPRPNAFDIWGQG

SEQ ID NO: 6971 - protein, 15 aa, Artificial Sequence
  Description of Artificial Sequence: Synthetic antibody
CTHVRSPSMGAFWIW

SEQ ID NO: 6972 - DNA, 129 bp, Artificial Sequence
  Description of Artificial Sequence: Synthetic antibody
accaaggacacctccaaaaaccaggtggtccttacaatgaccaacatggaccctgtggacacagccacatatttctgtacacacgtccgttctccgagcatgggtgctttttggatctggggccaaggg

SEQ ID NO: 6973 - protein, 43 aa, Artificial Sequence
  Description of Artificial Sequence: Synthetic antibody
TKDTSKNQVVLTMTNMDPVDTATYFCTHVRSPSMGAFWIWGQG

SEQ ID NO: 6974 - DNA, 129 bp, Artificial Sequence
  Description of Artificial Sequence: Synthetic antibody
accaaggacacctccaaaaaccaggtggtccttacaatgaccaacatggaccctgcggacacagccacatatttctgtacacacgtccgttctccgagcatgggtgctttttggatctggggccaaggg

SEQ ID NO: 6975 - protein, 43 aa, Artificial Sequence
  Description of Artificial Sequence: Synthetic antibody
TKDTSKNQVVLTMTNMDPADTATYFCTHVRSPSMGAFWIWGQG

SEQ ID NO: 6976 - protein, 19 aa, Artificial Sequence
  Description of Artificial Sequence: Synthetic antibody
CAREPIQLWLLPWSGADYW

SEQ ID NO: 6977 - DNA, 129 bp, Artificial Sequence
  Description of Artificial Sequence: Synthetic antibody
tccatcagcacagcctacatggagctgagcaggctgagatctgacgacacggccgtgtattactgtgcgagagagccaatacagctatggttactcccctggtccggagcggactactggggccaggga

SEQ ID NO: 6978 - protein, 43 aa, Artificial Sequence
  Description of Artificial Sequence: Synthetic antibody
SISTAYMELSRLRSDDTAVYYCAREPIQLWLLPWSGADYWGQG

SEQ ID NO: 6979 - DNA, 129 bp, Artificial Sequence
  Description of Artificial Sequence: Synthetic antibody
tccatcagcacagcctacatggagctgagcaggctgagatctgacgacacagccgtgtattactgtgcgagagagccaatacagctatggttactcccctggtccggagcggactactggggccaggga

SEQ ID NO: 6980 - protein, 15 aa, Artificial Sequence
  Description of Artificial Sequence: Synthetic antibody
CARTKWFGEFPFDYW

SEQ ID NO: 6981 - DNA, 129 bp, Artificial Sequence
  Description of Artificial Sequence: Synthetic antibody
ctccaagacacctccaaaagccaggtggtccttaccatgaccaacatggaccctgtggacacagccacatattactgtgcacggacaaaatggttcggggagtttccttttgactactggggccaggga

SEQ ID NO: 6982 - protein, 43 aa, Artificial Sequence
  Description of Artificial Sequence: Synthetic antibody
LQDTSKSQVVLTMTNMDPVDTATYYCARTKWFGEFPFDYWGQG

SEQ ID NO: 6983 - DNA, 129 bp, Artificial Sequence
  Description of Artificial Sequence: Synthetic antibody
tccaaggacacctccaaaagccaggtggtccttaccatgaccaacatggaccctgtggacacagccacatattactgtgcacggacaaaatggttcggggagtttccttttgactactggggccaggga

SEQ ID NO: 6984 - protein, 43 aa, Artificial Sequence
  Description of Artificial Sequence: Synthetic antibody
SKDTSKSQVVLTMTNMDPVDTATYYCARTKWFGEFPFDYWGQG

SEQ ID NO: 6985 - protein, 17 aa, Artificial Sequence
  Description of Artificial Sequence: Synthetic antibody
CARVLSTFGGVGAFDIW

SEQ ID NO: 6986 - DNA, 129 bp, Artificial Sequence
  Description of Artificial Sequence: Synthetic antibody
gacgcatccgcgagcacagcctacatggagctgagcagcctgagatctgaagacacggctgtgtattactgtgcgagagtcttgagtacatttgggggagttggggcttttgatatctggggccaaggg

SEQ ID NO: 6987 - protein, 43 aa, Artificial Sequence
  Description of Artificial Sequence: Synthetic antibody
DASASTAYMELSSLRSEDTAVYYCARVLSTFGGVGAFDIWGQG

SEQ ID NO: 6988 - DNA, 129 bp, Artificial Sequence
  Description of Artificial Sequence: Synthetic antibody
gacacatccgcgagcacagcctacatggagctgagcagcctgagatctgaagacacggctgtgtattactgtgcgagagtcttgagtacatttgggggagttggggcttttgatatctggggccaaggg

SEQ ID NO: 6989 - protein, 43 aa, Artificial Sequence
  Description of Artificial Sequence: Synthetic antibody
DTSASTAYMELSSLRSEDTAVYYCARVLSTFGGVGAFDIWGQG

SEQ ID NO: 6990 - protein, 19 aa, Artificial Sequence
  Description of Artificial Sequence: Synthetic antibody
CARDGYYYDSSGSDAFDIW

SEQ ID NO: 6991 - DNA, 129 bp, Artificial Sequence
  Description of Artificial Sequence: Synthetic antibody
tccaagaactcgctgtatcttcaaatgaacagcctgagagccgaggacacggccgtgtattactgtgcgagagatgggtattactatgatagtagtggctccgatgcttttgatatctggggccaaggg

SEQ ID NO: 6992 - protein, 43 aa, Artificial Sequence
  Description of Artificial Sequence: Synthetic antibody
SKNSLYLQMNSLRAEDTAVYYCARDGYYYDSSGSDAFDIWGQG

SEQ ID NO: 6993 - DNA, 129 bp, Artificial Sequence
  Description of Artificial Sequence: Synthetic antibody
tccaagaacacgctgtatcttcaaatgaacagcctgagagccgaggacacggccgtgtattactgtgcgagagatgggtattactatgatagtagtggctccgatgcttttgatatctggggccaaggg

SEQ ID NO: 6994 - protein, 43 aa, Artificial Sequence
  Description of Artificial Sequence: Synthetic antibody
SKNTLYLQMNSLRAEDTAVYYCARDGYYYDSSGSDAFDIWGQG

SEQ ID NO: 6995 - protein, 16 aa, Artificial Sequence
  Description of Artificial Sequence: Synthetic antibody
CARGLSSWEPYYFDYW

SEQ ID NO: 6996 - DNA, 129 bp, Artificial Sequence
  Description of Artificial Sequence: Synthetic antibody
ccagacacatccaagaaccagttctccctgcagctgaactctgtgactcccgaggacacggctgtgtattactgtgcaagaggtctcagcagctgggaaccttactactttgactactggggccaggga

SEQ ID NO: 6997 - protein, 43 aa, Artificial Sequence
  Description of Artificial Sequence: Synthetic antibody
PDTSKNQFSLQLNSVTPEDTAVYYCARGLSSWEPYYFDYWGQG

SEQ ID NO: 6998 - DNA, 129 bp, Artificial Sequence
  Description of Artificial Sequence: Synthetic antibody
ccagacacatccaagaaccagttctccctgcagctgaactctgtgactcccgaggacacggctgtgtattactgtgcaagaggtctcagcagctgggaaccttactactttgactactgggaccaggga

SEQ ID NO: 6999 - protein, 43 aa, Artificial Sequence
  Description of Artificial Sequence: Synthetic antibody
PDTSKNQFSLQLNSVTPEDTAVYYCARGLSSWEPYYFDYWDQG

SEQ ID NO: 7000 - protein, 14 aa, Artificial Sequence
  Description of Artificial Sequence: Synthetic antibody
CASQYTGYDYFDYW

SEQ ID NO: 7001 - DNA, 129 bp, Artificial Sequence
  Description of Artificial Sequence: Synthetic antibody
ttctccttggacacctctgtcagcacggcatatctgcagatcagcagcctaaaggctgaggacactgccgtgtattactgtgcgagtcaatatactggctacgattactttgactactggggtcaggga

SEQ ID NO: 7002 - protein, 43 aa, Artificial Sequence
  Description of Artificial Sequence: Synthetic antibody
FSLDTSVSTAYLQISSLKAEDTAVYYCASQYTGYDYFDYWGQG

SEQ ID NO: 7003 - DNA, 129 bp, Artificial Sequence
  Description of Artificial Sequence: Synthetic antibody
ttctccttagacacctctgtcagcacggcatatctgcagatcagcagcctaaaggctgaggacactgccgtgtattattgtgcgagtcaatatactggctacgattactttgactactggggtcaggga

SEQ ID NO: 7004 - protein, 15 aa, Artificial Sequence
  Description of Artificial Sequence: Synthetic antibody
CARDDYSDYRPFDYW

SEQ ID NO: 7005 - DNA, 129 bp, Artificial Sequence
  Description of Artificial Sequence: Synthetic antibody
accacagacacgtccacgaccacagcctacatggaactgaagaacctgagatctgacgacacggccgtttattactgtgcgagagatgactacagtgactaccgcccatttgactactggggccaggga

SEQ ID NO: 7006 - protein, 43 aa, Artificial Sequence
  Description of Artificial Sequence: Synthetic antibody
TTDTSTTTAYMELKNLRSDDTAVYYCARDDYSDYRPFDYWGQG

SEQ ID NO: 7007 - DNA, 129 bp, Artificial Sequence
  Description of Artificial Sequence: Synthetic antibody
accacagacacgcccacgaccacagcctacatggaactgaagaacctgagatctgacgacacggccgtttattactgtgcgagagatgactacagtgactaccgcccatttgactactggggccaggga

SEQ ID NO: 7008 - protein, 43 aa, Artificial Sequence
  Description of Artificial Sequence: Synthetic antibody
TTDTPTTTAYMELKNLRSDDTAVYYCARDDYSDYRPFDYWGQG

SEQ ID NO: 7009 - protein, 25 aa, Artificial Sequence
  Description of Artificial Sequence: Synthetic antibody
CAISFYCTGGVCYLPRYYYYGMDVW

SEQ ID NO: 7010 - DNA, 129 bp, Artificial Sequence
  Description of Artificial Sequence: Synthetic antibody
ttggagctgaggagcctgagatctgacgacacggccgtgtattactgtgcgatctcgttctattgtactggtggtgtatgctatttgcctcggtactactactacggtatggacgtctggggccaaggg

SEQ ID NO: 7011 - protein, 43 aa, Artificial Sequence
  Description of Artificial Sequence: Synthetic antibody
LELRSLRSDDTAVYYCAISFYCTGGVCYLPRYYYYGMDVWGQG

SEQ ID NO: 7012 - DNA, 129 bp, Artificial Sequence
  Description of Artificial Sequence: Synthetic antibody
atggagctgaggagcctgagatctgacgacacggccgtgtattactgtgcgatctcgttctattgtactggtggtgtatgctatttgcctcggtactactactacggtatggacgtctggggccaaggg

SEQ ID NO: 7013 - protein, 43 aa, Artificial Sequence
  Description of Artificial Sequence: Synthetic antibody
MELRSLRSDDTAVYYCAISFYCTGGVCYLPRYYYYGMDVWGQG

SEQ ID NO: 7014 - protein, 21 aa, Artificial Sequence
  Description of Artificial Sequence: Synthetic antibody
CAHTPYDFWSGYGGFGWFDPW

SEQ ID NO: 7015 - DNA, 129 bp, Artificial Sequence
  Description of Artificial Sequence: Synthetic antibody
aaccaggtggtccttacaatgaccaacatggaccctgtggacacagccacatattactgtgcacacaccccgtacgatttttggagtggttatggtgggtttgggtggttcgacccctggggccaggga

SEQ ID NO: 7016 - protein, 43 aa, Artificial Sequence
  Description of Artificial Sequence: Synthetic antibody
NQVVLTMTNMDPVDTATYYCAHTPYDFWSGYGGFGWFDPWGQG

SEQ ID NO: 7017 - DNA, 129 bp, Artificial Sequence
  Description of Artificial Sequence: Synthetic antibody
aaaccaggtggtcctacaatgaccaacatggaccctgtggacacagccacatattactgtgcacacaccccgtacgatttttggagtggttatggtgggtttgggtggttcgacccctggggccaggga

SEQ ID NO: 7018 - protein, 43 aa, Artificial Sequence
  Description of Artificial Sequence: Synthetic antibody
KPGGPTMTNMDPVDTATYYCAHTPYDFWSGYGGFGWFDPWGQG

SEQ ID NO: 7019 - protein, 17 aa, Artificial Sequence
  Description of Artificial Sequence: Synthetic antibody
CARLAAAAAGPYGMDVW

SEQ ID NO: 7020 - DNA, 129 bp, Artificial Sequence
  Description of Artificial Sequence: Synthetic antibody
gacacgtccacgagcacagtctacatggagctgagcagcctgagatctgaggacacggccgtgtattactgtgcgaggctagcagcagctgctgccggaccctacggtatggacgtctggggccaaggg

SEQ ID NO: 7021 - protein, 43 aa, Artificial Sequence
  Description of Artificial Sequence: Synthetic antibody
DTSTSTVYMELSSLRSEDTAVYYCARLAAAAAGPYGMDVWGQG

SEQ ID NO: 7022 - DNA, 129 bp, Artificial Sequence
  Description of Artificial Sequence: Synthetic antibody
gacacgcccacgagcactgtctacatggagctgagcagcctgagatctgaggacacggccgtgtattactgtgcgaggctagcagcagctgctgccggaccctacggtatggacgtctggggccaaggg

SEQ ID NO: 7023 - protein, 43 aa, Artificial Sequence
  Description of Artificial Sequence: Synthetic antibody
DTPTSTVYMELSSLRSEDTAVYYCARLAAAAAGPYGMDVWGQG

SEQ ID NO: 7024 - protein, 15 aa, Artificial Sequence
  Description of Artificial Sequence: Synthetic antibody
CAKWRMVQGVETDYW

SEQ ID NO: 7025 - DNA, 129 bp, Artificial Sequence
  Description of Artificial Sequence: Synthetic antibody
tccagagacaattccaagaacacgctgtatctgcaaatgaacagcctgagagccgaggacacggccgtatattactgtgcgaaatggcgtatggttcagggagttgaaactgactactggggccaggga

SEQ ID NO: 7026 - protein, 43 aa, Artificial Sequence
  Description of Artificial Sequence: Synthetic antibody
SRDNSKNTLYLQMNSLRAEDTAVYYCAKWRMVQGVETDYWGQG

SEQ ID NO: 7027 - DNA, 129 bp, Artificial Sequence
  Description of Artificial Sequence: Synthetic antibody
tccagacacaattccaacaacacgctgtatctgcaaatgaacagcctgagagccgaggacacggccgtatattactgtgcgaaatggcgtatggttcagggagttgaaactgactactggggccaggga

SEQ ID NO: 7028 - protein, 43 aa, Artificial Sequence
  Description of Artificial Sequence: Synthetic antibody
SRHNSNNTLYLQMNSLRAEDTAVYYCAKWRMVQGVETDYWGQG

SEQ ID NO: 7029 - protein, 13 aa, Artificial Sequence [sequence omitted]

SEQ ID NO: 7030 - DNA, 129 bp, Artificial Sequence
  Description of Artificial Sequence: Synthetic antibody
accatatcagtagacacgtccaagaaccagttctccctgaagctgagctctgtgaccgccgcggacacggctgtgtattactgtgcgagagcaccctatagcagcagctttgactactggggccaggga

SEQ ID NO: 7031 - protein, 43 aa, Artificial Sequence
  Description of Artificial Sequence: Synthetic antibody
TISVDTSKNQFSLKLSSVTAADTAVYYCARAPYSSSFDYWGQG

SEQ ID NO: 7032 - DNA, 129 bp, Artificial Sequence
  Description of Artificial Sequence: Synthetic antibody
accatatcagtagacacgcccaagaaccagttctccctgaagctgagctctgtgaccgccgcggacacggctgtgtattactgtgcgagagcaccctatagcagcagctttgactactggggccaggga

SEQ ID NO: 7033 - protein, 43 aa, Artificial Sequence
  Description of Artificial Sequence: Synthetic antibody
TISVDTPKNQFSLKLSSVTAADTAVYYCARAPYSSSFDYWGQG

SEQ ID NO: 7034 - protein, 14 aa, Artificial Sequence
  Description of Artificial Sequence: Synthetic antibody
CASGPNSGSYWYYW

SEQ ID NO: 7035 - DNA, 129 bp, Artificial Sequence
  Description of Artificial Sequence: Synthetic antibody
ttgaccagggacacgtccacgagcacagtctacatggagctgagcagcctgagatctgaggacacggccgtgtattactgtgcgagcggtcctaatagtgggagctactggtactactggggccaggga

SEQ ID NO: 7036 - protein, 43 aa, Artificial Sequence
  Description of Artificial Sequence: Synthetic antibody
LTRDTSTSTVYMELSSLRSEDTAVYYCASGPNSGSYWYYWGQG

SEQ ID NO: 7037 - DNA, 129 bp, Artificial Sequence
  Description of Artificial Sequence: Synthetic antibody
atgaccagggacacgtccacgagcacagtctacatggagctgagcagcctgagatctgaggacacggccgtgtattactgtgcgagcggtcctaatagtgggagctactggtactactggggccaggga

SEQ ID NO: 7038 - protein, 43 aa, Artificial Sequence
  Description of Artificial Sequence: Synthetic antibody
MTRDTSTSTVYMELSSLRSEDTAVYYCASGPNSGSYWYYWGQG

SEQ ID NO: 7039 - protein, 17 aa, Artificial Sequence
  Description of Artificial Sequence: Synthetic antibody
CASGEQQLVGGDYFDYW

SEQ ID NO: 7040 - DNA, 129 bp, Artificial Sequence
  Description of Artificial Sequence: Synthetic antibody
gacaacgccaagaactcactgtatctgcaaatgaacagcctgagagccgaggacacggccgtgtattactgtgcgagtggggagcagcagttggtaggaggggactactttgactactggggccaggga

SEQ ID NO: 7041 - protein, 43 aa, Artificial Sequence
  Description of Artificial Sequence: Synthetic antibody
DNAKNSLYLQMNSLRAEDTAVYYCASGEQQLVGGDYFDYWGQG

SEQ ID NO: 7042 - DNA, 129 bp, Artificial Sequence
  Description of Artificial Sequence: Synthetic antibody
gacaacgccaagaactcactgtatctgcaaatgaacagcctgagagccgaggacacggccgtgtattactgtgcgagtggggagcagcagctggtaggaggggactactttgactactggggccaggga

SEQ ID NO: 7043 - protein, 21 aa, Artificial Sequence
  Description of Artificial Sequence: Synthetic antibody
CAKEGDVYYDYVWGSYELDYW

SEQ ID NO: 7044 - DNA, 129 bp, Artificial Sequence
  Description of Artificial Sequence: Synthetic antibody
aacacgctgtatctgcaaatgaacagcctgagagccgaggacacggccgtatattactgtgcgaaagagggcgacgtgtattatgattacgtttgggggagttatgaacttgactactggggccaggga

SEQ ID NO: 7045 - protein, 43 aa, Artificial Sequence
  Description of Artificial Sequence: Synthetic antibody
NTLYLQMNSLRAEDTAVYYCAKEGDVYYDYVWGSYELDYWGQG

SEQ ID NO: 7046 - DNA, 129 bp, Artificial Sequence
  Description of Artificial Sequence: Synthetic antibody
aacacgatgtatctgcaaatcaacagcctgagagccgaggacacggccgtatattactgtgcgaaagagggcgacgtgtattatgattacgtttgggggagttatgaacttgactactggggccaggga

SEQ ID NO: 7047 - protein, 43 aa, Artificial Sequence
  Description of Artificial Sequence: Synthetic antibody
NTMYLQINSLRAEDTAVYYCAKEGDVYYDYVWGSYELDYWGQG

SEQ ID NO: 7048 - protein, 22 aa, Artificial Sequence
  Description of Artificial Sequence: Synthetic antibody
CARGGGNGWRSEGYYYYGMDVW

SEQ ID NO: 7049 - DNA, 129 bp, Artificial Sequence
  Description of Artificial Sequence: Synthetic antibody
actgtctacttggagctgagcagcctgagatctgaggacacggccgtgtattactgtgcgagaggtggaggtaatggctggcgaagcgaaggctactactactacggtatggacgtctggggccaaggg

SEQ ID NO: 7050 - protein, 43 aa, Artificial Sequence
  Description of Artificial Sequence: Synthetic antibody
TVYLELSSLRSEDTAVYYCARGGGNGWRSEGYYYYGMDVWGQG

SEQ ID NO: 7051 - DNA, 129 bp, Artificial Sequence
  Description of Artificial Sequence: Synthetic antibody
acagtctacatggagctgagcagcctgagatctgaggacacggccgtgtattactgtgcgagaggtggaggtaatggctggcgaagcgaaggctactactactacggtatggacgtctggggccaaggg

SEQ ID NO: 7052 - protein, 43 aa, Artificial Sequence
  Description of Artificial Sequence: Synthetic antibody
TVYMELSSLRSEDTAVYYCARGGGNGWRSEGYYYYGMDVWGQG

SEQ ID NO: 7053 - protein, 22 aa, Artificial Sequence
  Description of Artificial Sequence: Synthetic antibody
CARDLKDIVVVVAAVHDAFDIW

SEQ ID NO: 7054 - DNA, 129 bp, Artificial Sequence
  Description of Artificial Sequence: Synthetic antibody
acagcctacttggagctgaggagcctgagatctgacgacacggccgtgtattactgtgcgagagatctcaaggatattgtagtggtggtagctgctgtccatgatgcttttgatatctggggccaaggg

SEQ ID NO: 7055 - protein, 43 aa, Artificial Sequence
  Description of Artificial Sequence: Synthetic antibody
TAYLELRSLRSDDTAVYYCARDLKDIVVVVAAVHDAFDIWGQG

SEQ ID NO: 7056 - DNA, 129 bp, Artificial Sequence
  Description of Artificial Sequence: Synthetic antibody
acagcctacatggagctgaggagcctgagatctgacgacacggccgtgtattactgtgcgagagatctcaaggatattgtagtggtggtagctgctgtccatgatgcttttgatatctggggccaaggg

SEQ ID NO: 7057 - protein, 43 aa, Artificial Sequence
  Description of Artificial Sequence: Synthetic antibody
TAYMELRSLRSDDTAVYYCARDLKDIVVVVAAVHDAFDIWGQG

SEQ ID NO: 7058 - protein, 19 aa, Artificial Sequence
  Description of Artificial Sequence: Synthetic antibody
CARRGAYSGSFRTWAFDIW

SEQ ID NO: 7059 - DNA, 129 bp, Artificial Sequence
  Description of Artificial Sequence: Synthetic antibody
tccaagaaccagttctccctgaagctgagctctgtgaccgccgcagacacggctgtgtattactgtgcgagacgtggcgcttattccggttcgttccgcacatgggcttttgatatctggggccaaggg

SEQ ID NO: 7060 - protein, 43 aa, Artificial Sequence
  Description of Artificial Sequence: Synthetic antibody
SKNQFSLKLSSVTAADTAVYYCARRGAYSGSFRTWAFDIWGQG

SEQ ID NO: 7061 - DNA, 129 bp, Artificial Sequence
  Description of Artificial Sequence: Synthetic antibody
tccaagaaccagttctccctgaagccgagctctgtgaccgccgcagacacggctgtgtattactgtgcgagacgtggcgcttattccggttcgttccgcacatgggcttttgatatctggggccaaggg

SEQ ID NO: 7062 - protein, 43 aa, Artificial Sequence
  Description of Artificial Sequence: Synthetic antibody
SKNQFSLKPSSVTAADTAVYYCARRGAYSGSFRTWAFDIWGQG

SEQ ID NO: 7063 - protein, 18 aa, Artificial Sequence
  Description of Artificial Sequence: Synthetic antibody
CARDVYYGSGSYYWFDPW

SEQ ID NO: 7064 - DNA, 129 bp, Artificial Sequence
  Description of Artificial Sequence: Synthetic antibody
aaatccacgagcacagtctacatggagctgagcagcctgagatctgaggacacggccgtgtattactgtgcgagagatgtgtactatggttcggggagttattactggttcgacccctggggccaggga

SEQ ID NO: 7065 - protein, 43 aa, Artificial Sequence
  Description of Artificial Sequence: Synthetic antibody
KSTSTVYMELSSLRSEDTAVYYCARDVYYGSGSYYWFDPWGQG

SEQ ID NO: 7066 - DNA, 129 bp, Artificial Sequence
  Description of Artificial Sequence: Synthetic antibody
aaatccacgagcacagcctacatggagctgagcagcctgagatctgaggacacggccgtgtattactgtgcgagagatgtgtactatggttcggggagttattactggttcgacccctggggccaggga

SEQ ID NO: 7067 - protein, 43 aa, Artificial Sequence
  Description of Artificial Sequence: Synthetic antibody
KSTSTAYMELSSLRSEDTAVYYCARDVYYGSGSYYWFDPWGQG

SEQ ID NO: 7068 - protein, 23 aa, Artificial Sequence
  Description of Artificial Sequence: Synthetic antibody
CARDLASRQQLVLIGYWNYFDYW

SEQ ID NO: 7069 - DNA, 129 bp, Artificial Sequence
  Description of Artificial Sequence: Synthetic antibody
ctgtatctgcaaatgaacagtctgagagccgaggacacggccttgtattactgtgcgagagatctagcaagtaggcagcagctggtactgatcgggtattggaactactttgactactggggccagggg

SEQ ID NO: 7070 - protein, 43 aa, Artificial Sequence
  Description of Artificial Sequence: Synthetic antibody
LYLQMNSLRAEDTALYYCARDLASRQQLVLIGYWNYFDYWGQG

SEQ ID NO: 7071 - DNA, 129 bp, Artificial Sequence
  Description of Artificial Sequence: Synthetic antibody
ctgtatctgcaaatgaacagtctgagagccgaggacacggccttgtattactgtgcgagagatctagcaagtaggcagcagctggtactgatcgggtattggaactactttgactactggggccaggga

SEQ ID NO: 7072 - protein, 15 aa, Artificial Sequence
  Description of Artificial Sequence: Synthetic antibody
CARGWHAKNDAFDIW

SEQ ID NO: 7073 - DNA, 129 bp, Artificial Sequence
  Description of Artificial Sequence: Synthetic antibody
tcagttgactcgtccaagaaccagttctccctgaagctgagctctgtgaccgccgcggacacggccgtgtattactgtgcgagagggtggcatgctaaaaatgatgcttttgatatctggggccaaggg

SEQ ID NO: 7074 - protein, 43 aa, Artificial Sequence
  Description of Artificial Sequence: Synthetic antibody
SVDSSKNQFSLKLSSVTAADTAVYYCARGWHAKNDAFDIWGQG

SEQ ID NO: 7075 - DNA, 129 bp, Artificial Sequence
  Description of Artificial Sequence: Synthetic antibody
tcagtagacacgtccaagaaccagttctccctgaagctgagctctgtgaccgccgcggacacggccgtgtattactgtgcgagagggtggcatgctaaaaatgatgcttttgatatctggggccaaggg

SEQ ID NO: 7076 - protein, 43 aa, Artificial Sequence
  Description of Artificial Sequence: Synthetic antibody
SVDTSKNQFSLKLSSVTAADTAVYYCARGWHAKNDAFDIWGQG

SEQ ID NO: 7077 - protein, 15 aa, Artificial Sequence
  Description of Artificial Sequence: Synthetic antibody
CARDRLSWGRYFDLW

SEQ ID NO: 7078 - DNA, 129 bp, Artificial Sequence
  Description of Artificial Sequence: Synthetic antibody
tccagagacaattccaagaacacgctgtatcttcaaatgaacagcctgagagccgaggacacggccgtgtattactgtgcgagagaccggctttcctggggacggtacttcgatctctggggccgtggc

SEQ ID NO: 7079 - protein, 43 aa, Artificial Sequence
  Description of Artificial Sequence: Synthetic antibody
SRDNSKNTLYLQMNSLRAEDTAVYYCARDRLSWGRYFDLWGRG

SEQ ID NO: 7080 - DNA, 129 bp, Artificial Sequence
  Description of Artificial Sequence: Synthetic antibody
tacagagacaattccaagaacacgctgtatcttcaaatgaacagcctgagagccgaggacacggccgtgtattactgtgcgagagaccggctttcctggggacggtacttcgatctctggggccgtagc

SEQ ID NO: 7081 - protein, 43 aa, Artificial Sequence
  Description of Artificial Sequence: Synthetic antibody
YRDNSKNTLYLQMNSLRAEDTAVYYCARDRLSWGRYFDLWGRS

SEQ ID NO: 7082 - protein, 19 aa, Artificial Sequence
  Description of Artificial Sequence: Synthetic antibody
CARHTLAQLWFGDYGMDVW

SEQ ID NO: 7083 - DNA, 129 bp, Artificial Sequence
  Description of Artificial Sequence: Synthetic antibody
tccatcagcacagcctacatggagctgagcgggctgagatctgacgacacggccgtgtattactgtgcgagacataccttagcccaattatggttcggggactacggtatggacgtctggggccaaggg

SEQ ID NO: 7084 - protein, 43 aa, Artificial Sequence
  Description of Artificial Sequence: Synthetic antibody
SISTAYMELSGLRSDDTAVYYCARHTLAQLWFGDYGMDVWGQG

SEQ ID NO: 7085 - DNA, 129 bp, Artificial Sequence
  Description of Artificial Sequence: Synthetic antibody
tccatcagcacagcctacatggagctgagcaggctgagatctgacgacacggccgtgtattactgtgcgagacataccttagcccaattatggttcggggactacggtatggacgtctggggccaaggg

SEQ ID NO: 7086 - protein, 43 aa, Artificial Sequence
  Description of Artificial Sequence: Synthetic antibody
SISTAYMELSRLRSDDTAVYYCARHTLAQLWFGDYGMDVWGQG

SEQ ID NO: 7087 - protein, 17 aa, Artificial Sequence
  Description of Artificial Sequence: Synthetic antibody
CARITWFGELYNGMDVW

SEQ ID NO: 7088 - DNA, 129 bp, Artificial Sequence
  Description of Artificial Sequence: Synthetic antibody
gacacctccaaaaaccaggtggtccttacaatgaccaacatggaccctgtggacacagccacgtattactgtgcacggataacatggttcggggagttatataacggtatggacgtctggggccaaggg

SEQ ID NO: 7089 - protein, 43 aa, Artificial Sequence
  Description of Artificial Sequence: Synthetic antibody
DTSKNQVVLTMTNMDPVDTATYYCARITWFGELYNGMDVWGQG

SEQ ID NO: 7090 - DNA, 129 bp, Artificial Sequence
  Description of Artificial Sequence: Synthetic antibody
ggacacctccaaaaccaggtggtccttacaatgaccaacatggaccctgtggacacagccacgtattactgtgcacggataacatggttcggggagttatataacggtatggacgtctggggccaaggg

SEQ ID NO: 7091 - protein, 43 aa, Artificial Sequence
  Description of Artificial Sequence: Synthetic antibody
GHLQNQVVLTMTNMDPVDTATYYCARITWFGELYNGMDVWGQG

SEQ ID NO: 7092 - protein, 20 aa, Artificial Sequence
  Description of Artificial Sequence: Synthetic antibody
CARGHQSGYNYYYYYGMDVW

SEQ ID NO: 7093 - DNA, 129 bp, Artificial Sequence
  Description of Artificial Sequence: Synthetic antibody
aagaaccagttctccctgaagctgagctttgtgaccgccgcggacacggctgtgtattactgtgcgagagggcatcaaagtggctacaactactactactactacggtatggacgtctggggccaaggg

SEQ ID NO: 7094 - protein, 43 aa, Artificial Sequence
  Description of Artificial Sequence: Synthetic antibody
KNQFSLKLSFVTAADTAVYYCARGHQSGYNYYYYYGMDVWGQG

SEQ ID NO: 7095 - DNA, 129 bp, Artificial Sequence
  Description of Artificial Sequence: Synthetic antibody
aagaaccagttctccctgaagctgagctctgtgaccgccgcggacacggctgtgtattactgtgcgagagggcatcaaagtggctacaactactactactactacggtatggacgtctggggccaaggg

SEQ ID NO: 7096 - protein, 43 aa, Artificial Sequence
  Description of Artificial Sequence: Synthetic antibody
KNQFSLKLSSVTAADTAVYYCARGHQSGYNYYYYYGMDVWGQG

SEQ ID NO: 7097 - protein, 11 aa, Artificial Sequence
  Description of Artificial Sequence: Synthetic antibody
CARGVYSFDFW

SEQ ID NO: 7098 - DNA, 129 bp, Artificial Sequence
  Description of Artificial Sequence: Synthetic antibody
cgagttaccatgtcagtagacacgtctaagaaccagttctccctgaagttgagctctgtgactgccgcggacgcggccgtgtattactgtgcgagaggggtctacagctttgacttctggggccaggga

SEQ ID NO: 7099 - protein, 43 aa, Artificial Sequence
  Description of Artificial Sequence: Synthetic antibody
RVTMSVDTSKNQFSLKLSSVTAADAAVYYCARGVYSFDFWGQG

SEQ ID NO: 7100 - DNA, 129 bp, Artificial Sequence
  Description of Artificial Sequence: Synthetic antibody
cgagttaccatgtcagtagacacgtctaagaaccagttctccctgaagctgagctctgtgactgccgcggacgcggccgtgtattactgtgcgagaggggtctacagcttcgacttctggggccaggga

SEQ ID NO: 7101 - protein, 17 aa, Artificial Sequence
  Description of Artificial Sequence: Synthetic antibody
CAHKSLSYYNVGWFDPW

SEQ ID NO: 7102 - DNA, 129 bp, Artificial Sequence
  Description of Artificial Sequence: Synthetic antibody
gacacctccaaaaaccaggtggtccttacaatgaccaacatggaccctgtggacacagccacatattactgtgcacacaagtccctaagttattataacgtcgggtggttcgacccctggggccaggga

SEQ ID NO: 7103 - protein, 43 aa, Artificial Sequence
  Description of Artificial Sequence: Synthetic antibody
DTSKNQVVLTMTNMDPVDTATYYCAHKSLSYYNVGWFDPWGQG

SEQ ID NO: 7104 - DNA, 129 bp, Artificial Sequence
  Description of Artificial Sequence: Synthetic antibody
gacacccccaaaaaccaggtggtccttacaatgaccaacatggaccctgtggacacagccacatattactgtgcacacaagtccctaagttattataacgtcgggtggttcgacccctggggtcaggga

SEQ ID NO: 7105 - protein, 43 aa, Artificial Sequence
  Description of Artificial Sequence: Synthetic antibody
DTPKNQVVLTMTNMDPVDTATYYCAHKSLSYYNVGWFDPWGQG

SEQ ID NO: 7106 - protein, 15 aa, Artificial Sequence
  Description of Artificial Sequence: Synthetic antibody
CAHKVSVVRGVINYW

SEQ ID NO: 7107 - DNA, 129 bp, Artificial Sequence
  Description of Artificial Sequence: Synthetic antibody
caccaaggacacctccaaaaccaggtggtccttacaatgaccaacatggaccctgtggacacagccacatattactgtgcacacaaagtttctgtggttcggggagttatcaactactggggccaggga

SEQ ID NO: 7108 - protein, 43 aa, Artificial Sequence
  Description of Artificial Sequence: Synthetic antibody
HQGHLQNQVVLTMTNMDPVDTATYYCAHKVSVVRGVINYWGQG

SEQ ID NO: 7109 - DNA, 129 bp, Artificial Sequence
  Description of Artificial Sequence: Synthetic antibody
accaaggacacctccaaaaaccaggtggtccttacaatgaccaacatggaccctgtggacacagccacatattactgtgcacacaaagtttctgtggttcggggagttatcaactactggggccaggga

SEQ ID NO: 7110 - protein, 43 aa, Artificial Sequence
  Description of Artificial Sequence: Synthetic antibody
TKDTSKNQVVLTMTNMDPVDTATYYCAHKVSVVRGVINYWGQG

SEQ ID NO: 7111 - protein, 13 aa, Artificial Sequence
  Description of Artificial Sequence: Synthetic antibody
CARGSSSSGHHYW

SEQ ID NO: 7112 - DNA, 129 bp, Artificial Sequence
  Description of Artificial Sequence: Synthetic antibody
tacatatcagtagacacgtccaagaaccagttctccctgaagctgagctctgtgaccgccgcggacacggctgtgtattactgtgcgagaggctcatcaagcagtggccatcattactggggccaggga

SEQ ID NO: 7113 - protein, 43 aa, Artificial Sequence
  Description of Artificial Sequence: Synthetic antibody
YISVDTSKNQFSLKLSSVTAADTAVYYCARGSSSSGHHYWGQG

SEQ ID NO: 7114 - DNA, 129 bp, Artificial Sequence
  Description of Artificial Sequence: Synthetic antibody
accatatcagtagacacgtccaagaaccagttctccctgaagctgagctctgtgaccgccgcggacacggctgtgtattactgtgcgagaggctcatcaagcagtggccatcattactggggccaggga

SEQ ID NO: 7115 - protein, 43 aa, Artificial Sequence
  Description of Artificial Sequence: Synthetic antibody
TISVDTSKNQFSLKLSSVTAADTAVYYCARGSSSSGHHYWGQG

SEQ ID NO: 7116 - protein, 24 aa, Artificial Sequence
  Description of Artificial Sequence: Synthetic antibody
CASEGGTICSSTSCPLGYYGMDVW

SEQ ID NO: 7117 - DNA, 129 bp, Artificial Sequence
  Description of Artificial Sequence: Synthetic antibody
tatctgcaaatgaacagcctgagagccgaggacacggccgtatattactgtgcctccgagggggggactatttgtagtagtaccagctgccccctcggctactacggtatggacgtctggggccaaggg

SEQ ID NO: 7118 - protein, 43 aa, Artificial Sequence
  Description of Artificial Sequence: Synthetic antibody
YLQMNSLRAEDTAVYYCASEGGTICSSTSCPLGYYGMDVWGQG

SEQ ID NO: 7119 - DNA, 129 bp, Artificial Sequence
  Description of Artificial Sequence: Synthetic antibody
tatatgcaaatcaacagcctgagagccgaggacacggccgtatattactgtgcctccgagggggggactatttgtagtagtaccagctgccccctcggctactacggtatggacgtctggggccaaggg

SEQ ID NO: 7120 - protein, 43 aa, Artificial Sequence
  Description of Artificial Sequence: Synthetic antibody
YMQINSLRAEDTAVYYCASEGGTICSSTSCPLGYYGMDVWGQG

SEQ ID NO: 7121 - protein, 16 aa, Artificial Sequence
  Description of Artificial Sequence: Synthetic antibody
CAKDRGHLPNDGSDYW

SEQ ID NO: 7122 - DNA, 129 bp, Artificial Sequence
  Description of Artificial Sequence: Synthetic antibody
agagacaacacccagaactccctctttctgcaaatgaacagtctgagagcggaagacacggccttctattattgtgcgaaagacagggggcacttaccaaacgacgggtctgactactggggccaggga

SEQ ID NO: 7123 - protein, 43 aa, Artificial Sequence
  Description of Artificial Sequence: Synthetic antibody
RDNTQNSLFLQMNSLRAEDTAFYYCAKDRGHLPNDGSDYWGQG

SEQ ID NO: 7124 - DNA, 129 bp, Artificial Sequence
  Description of Artificial Sequence: Synthetic antibody
agagacaacacccagaactccctctttctgcaaatgaacagtctgagagcggaagacacggcctcctattattgtgcgaaagacagggggcacttaccaaacgacgggtctgactactggggccaggga

SEQ ID NO: 7125 - protein, 43 aa, Artificial Sequence
  Description of Artificial Sequence: Synthetic antibody
RDNTQNSLFLQMNSLRAEDTASYYCAKDRGHLPNDGSDYWGQG

SEQ ID NO: 7126 - protein, 16 aa, Artificial Sequence
  Description of Artificial Sequence: Synthetic antibody
CARDQGGAGPTTVDYW

SEQ ID NO: 7127 - DNA, 129 bp, Artificial Sequence
  Description of Artificial Sequence: Synthetic antibody
cgagacaacgccaagaacacgctgtatctggaaatgaacagtctgggagccgaggacacggctgtgtattactgtgcaagagatcaggggggagcgggacctacaaccgtagactactggggccaggga

SEQ ID NO: 7128 - protein, 43 aa, Artificial Sequence
  Description of Artificial Sequence: Synthetic antibody
RDNAKNTLYLEMNSLGAEDTAVYYCARDQGGAGPTTVDYWGQG

SEQ ID NO: 7129 - DNA, 129 bp, Artificial Sequence
  Description of Artificial Sequence: Synthetic antibody
cgagacaacgccaagaacacgctgtatctgcaaatgaacagtctgggagccgaggacacggctgtgtattactgtgcaagagatcaggggggagcgggacctacaaccgtagactactggggccaggga

SEQ ID NO: 7130 - protein, 43 aa, Artificial Sequence
  Description of Artificial Sequence: Synthetic antibody
RDNAKNTLYLQMNSLGAEDTAVYYCARDQGGAGPTTVDYWGQG

SEQ ID NO: 7131 - protein, 12 aa, Artificial Sequence
  Description of Artificial Sequence: Synthetic antibody
CAHSTPDYFDYW

SEQ ID NO: 7132 - DNA, 129 bp, Artificial Sequence
  Description of Artificial Sequence: Synthetic antibody
ctcaccatcaccaaggacacctccaaaaaccagttggtccttacaatgaccaacatggaccctgtggacacaggcacgtattactgtgcacacagtaccccggactactttgactactggggccaggga

SEQ ID NO: 7133 - protein, 43 aa, Artificial Sequence
  Description of Artificial Sequence: Synthetic antibody
LTITKDTSKNQLVLTMTNMDPVDTGTYYCAHSTPDYFDYWGQG

SEQ ID NO: 7134 - DNA, 129 bp, Artificial Sequence
  Description of Artificial Sequence: Synthetic antibody
ctcaccatcaccaaggacacctccaaaaaccagttggtccttacaatgaccaacatggaccctgtggacacaggcacatattactgtgcacacagtaccccggactactttgactactggggccaggga

SEQ ID NO: 7135 - protein, 10 aa, Artificial Sequence
  Description of Artificial Sequence: Synthetic antibody
CAKLKAFDMW

SEQ ID NO: 7136 - DNA, 129 bp, Artificial Sequence
  Description of Artificial Sequence: Synthetic antibody
ggccggttcaccatctcaagagacaattccaagaacacggtgtatctgcaaatgaacagcctgagagccgaggacacggccgtatattactgtgcgaaactgaaggcttttgatatgtggggccaaggg

SEQ ID NO: 7137 - protein, 43 aa, Artificial Sequence
  Description of Artificial Sequence: Synthetic antibody
GRFTISRDNSKNTVYLQMNSLRAEDTAVYYCAKLKAFDMWGQG

SEQ ID NO: 7138 - DNA, 129 bp, Artificial Sequence
  Description of Artificial Sequence: Synthetic antibody
ggccggttcaccatctcaagacacaattccaagaacacggtgtatctgcaaatgaacagcctgagagccgaggacacggccgtatattactgtgcgaaactgaaggcttttgatatgtggggccaaggg

SEQ ID NO: 7139 - protein, 43 aa, Artificial Sequence
  Description of Artificial Sequence: Synthetic antibody
GRFTISRHNSKNTVYLQMNSLRAEDTAVYYCAKLKAFDMWGQG

SEQ ID NO: 7140 - protein, 24 aa, Artificial Sequence
  Description of Artificial Sequence: Synthetic antibody
CAKDGGSGTRVYYYGSGSYFIDYW

SEQ ID NO: 7141 - DNA, 129 bp, Artificial Sequence
  Description of Artificial Sequence: Synthetic antibody
tatctgcaaatgaacagcctgagagccgaggacacggccgtatattactgtgcgaaagatggtggaagtggaacgagggtgtattactatggttcggggagttattttattgactactggggccaggga

SEQ ID NO: 7142 - protein, 43 aa, Artificial Sequence
  Description of Artificial Sequence: Synthetic antibody
YLQMNSLRAEDTAVYYCAKDGGSGTRVYYYGSGSYFIDYWGQG

SEQ ID NO: 7143 - DNA, 129 bp, Artificial Sequence
  Description of Artificial Sequence: Synthetic antibody
tatatgaaaatgaacagcctgagagccgaggacacggccgtatattactgtgcgaaagatggtggaagtggaacgagggtgtattactatggttcggggagttattttattgactactggggccaggga

SEQ ID NO: 7144 - protein, 43 aa, Artificial Sequence
  Description of Artificial Sequence: Synthetic antibody
YMKMNSLRAEDTAVYYCAKDGGSGTRVYYYGSGSYFIDYWGQG

SEQ ID NO: 7145 - protein, 10 aa, Artificial Sequence
  Description of Artificial Sequence: Synthetic antibody
CARGWAPDYW

SEQ ID NO: 7146 - DNA, 129 bp, Artificial Sequence
  Description of Artificial Sequence: Synthetic antibody
tgtcgagtcaccatatcgatggacacgtccaagaaccaattctccctgaacctgaattctgtgaccgccgcggacacggctgtatattactgtgcgagaggttgggcacctgactactggggccaggga

SEQ ID NO: 7147 - protein, 43 aa, Artificial Sequence
  Description of Artificial Sequence: Synthetic antibody
CRVTISMDTSKNQFSLNLNSVTAADTAVYYCARGWAPDYWGQG

SEQ ID NO: 7148 - DNA, 129 bp, Artificial Sequence
  Description of Artificial Sequence: Synthetic antibody
agtcgagtcaccatatcgatggacacgtccaagaaccaattctccctgaacctgaattctgtgaccgccgcggacacggctgtatattactgtgcgagaggttgggcacctgactactggggccaggga

SEQ ID NO: 7149 - protein, 43 aa, Artificial Sequence
  Description of Artificial Sequence: Synthetic antibody
SRVTISMDTSKNQFSLNLNSVTAADTAVYYCARGWAPDYWGQG

SEQ ID NO: 7150 - protein, 22 aa, Artificial Sequence
  Description of Artificial Sequence: Synthetic antibody
CARVGGIAAAGNILLSYGMDVW

SEQ ID NO: 7151 - DNA, 129 bp, Artificial Sequence
  Description of Artificial Sequence: Synthetic antibody
actgcctacttggagctgaggagcctgagatctgacgacacggccgtgtattactgtgcgagagttggaggtatagcagcagctggtaacatcttgctgtcctacggtatggacgtctggggccaaggg

SEQ ID NO: 7152 - protein, 43 aa, Artificial Sequence
  Description of Artificial Sequence: Synthetic antibody
TAYLELRSLRSDDTAVYYCARVGGIAAAGNILLSYGMDVWGQG

SEQ ID NO: 7153 - DNA, 129 bp, Artificial Sequence
  Description of Artificial Sequence: Synthetic antibody
acagcctacatggagctgaggagcctgagatctgacgacacggccgtgtattactgtgcgagagttggaggtatagcagcagctggtaacatcttgctgtcctacggtatggacgtctggggccaaggg

SEQ ID NO: 7154 - protein, 43 aa, Artificial Sequence
  Description of Artificial Sequence: Synthetic antibody
TAYMELRSLRSDDTAVYYCARVGGIAAAGNILLSYGMDVWGQG

SEQ ID NO: 7155 - protein, 16 aa, Artificial Sequence
  Description of Artificial Sequence: Synthetic antibody
CAKDTSSGWYGPLSYW

SEQ ID NO: 7156 - DNA, 129 bp, Artificial Sequence
  Description of Artificial Sequence: Synthetic antibody
agagacaacgccaagaactccctgtatctgcaaatgaacagtctgagagctgatgacactgccttgtattactgtgcaaaagacactagcagtggctggtacggccccctttcctactggggccaggga

SEQ ID NO: 7157 - protein, 43 aa, Artificial Sequence
  Description of Artificial Sequence: Synthetic antibody
RDNAKNSLYLQMNSLRADDTALYYCAKDTSSGWYGPLSYWGQG

SEQ ID NO: 7158 - DNA, 129 bp, Artificial Sequence
  Description of Artificial Sequence: Synthetic antibody
agagacaacgccaagaactccctgtatctgcaaatgaacagtctgagagctgaggacacggccttgtattactgtgcaaaagacactagcagtggctggtacggccccctttcctactggggccaggga

SEQ ID NO: 7159 - protein, 43 aa, Artificial Sequence
  Description of Artificial Sequence: Synthetic antibody
RDNAKNSLYLQMNSLRAEDTALYYCAKDTSSGWYGPLSYWGQG

SEQ ID NO: 7160 - protein, 24 aa, Artificial Sequence
  Description of Artificial Sequence: Synthetic antibody
CARGRGSVVVPADTTSTYYGMDVW

SEQ ID NO: 7161 - DNA, 129 bp, Artificial Sequence
  Description of Artificial Sequence: Synthetic antibody
tccctgaagctgggctctgtgaccgccgcggacacggctgtgtattactgtgcgagaggccgggggagtgtagtagtaccagctgacaccacatctacttactacggtatggacgtctggggccaaggg

SEQ ID NO: 7162 - protein, 43 aa, Artificial Sequence
  Description of Artificial Sequence: Synthetic antibody
SLKLGSVTAADTAVYYCARGRGSVVVPADTTSTYYGMDVWGQG

SEQ ID NO: 7163 - DNA, 129 bp, Artificial Sequence
  Description of Artificial Sequence: Synthetic antibody
tccctgaagctgagctctgtgaccgccgcggacacggctgtgtattactgtgcgagaggccgggggagtgtagtagtaccagctgacaccacatctacttactacggtatggacgtctggggccaaggg

SEQ ID NO: 7164 - protein, 43 aa, Artificial Sequence
  Description of Artificial Sequence: Synthetic antibody
SLKLSSVTAADTAVYYCARGRGSVVVPADTTSTYYGMDVWGQG

SEQ ID NO: 7165 - protein, 14 aa, Artificial Sequence
  Description of Artificial Sequence: Synthetic antibody
CATDLDGDYKFDYW

SEQ ID NO: 7166 - DNA, 129 bp, Artificial Sequence
  Description of Artificial Sequence: Synthetic antibody
ttatcggtagacacgtccacgaaccagttctccctgaagatgagctctctgaccgccgcggacacggccgtgtatcactgcgcgacagatctggacggtgactacaaatttgactactggggccaggga

SEQ ID NO: 7167 - protein, 43 aa, Artificial Sequence
  Description of Artificial Sequence: Synthetic antibody
LSVDTSTNQFSLKMSSLTAADTAVYHCATDLDGDYKFDYWGQG

SEQ ID NO: 7168 - DNA, 129 bp, Artificial Sequence
  Description of Artificial Sequence: Synthetic antibody
atatcggtagacacgtccaagaaccagttctccctgaagatgagctctctgaccgccgcggacacggccgtgtatcactgcgcgacagatctggacggtgactacaaatttgactactggggccaggga

SEQ ID NO: 7169 - protein, 43 aa, Artificial Sequence
  Description of Artificial Sequence: Synthetic antibody
ISVDTSKNQFSLKMSSLTAADTAVYHCATDLDGDYKFDYWGQG

SEQ ID NO: 7170 - protein, 14 aa, Artificial Sequence
  Description of Artificial Sequence: Synthetic antibody
CARDDEGQHYFDYW

SEQ ID NO: 7171 - DNA, 129 bp, Artificial Sequence
  Description of Artificial Sequence: Synthetic antibody
atctccagggacaacgccaagaactcactgtatctgcaaatgaacagcctgagagccgaggacacggccgtgtattactgtgcgagagatgatgagggtcagcactactttgactactggggccaggga

SEQ ID NO: 7172 - protein, 43 aa, Artificial Sequence
  Description of Artificial Sequence: Synthetic antibody
ISRDNAKNSLYLQMNSLRAEDTAVYYCARDDEGQHYFDYWGQG

SEQ ID NO: 7173 - DNA, 129 bp, Artificial Sequence
  Description of Artificial Sequence: Synthetic antibody
atctccaggcacaaccccaagaactcactgtatctgcaaatgaacagcctgagagccgaggacacggccgtgtattactgtgcgagagatgatgagggtcagcactactttgactactggggccaggga

SEQ ID NO: 7174 - protein, 43 aa, Artificial Sequence
  Description of Artificial Sequence: Synthetic antibody
ISRHNPKNSLYLQMNSLRAEDTAVYYCARDDEGQHYFDYWGQG

SEQ ID NO: 7175 - protein, 21 aa, Artificial Sequence
  Description of Artificial Sequence: Synthetic antibody
CARSGVIGKYDSSPNDAFDIW

SEQ ID NO: 7176 - DNA, 129 bp, Artificial Sequence
  Description of Artificial Sequence: Synthetic antibody
aacacgctgtatcttcaaatgaacagcctgagagccgaggacacggccgtgtattactgtgcgagatcaggggtaatagggaagtatgatagtagcccaaatgatgcttttgatatctggggccaaggg

SEQ ID NO: 7177 - protein, 43 aa, Artificial Sequence
  Description of Artificial Sequence: Synthetic antibody
NTLYLQMNSLRAEDTAVYYCARSGVIGKYDSSPNDAFDIWGQG

SEQ ID NO: 7178 - DNA, 129 bp, Artificial Sequence
  Description of Artificial Sequence: Synthetic antibody
aacacgctgtatattcaaatgaacagcctgagagccgaggacacggccgtgtattactgtgcgagatcaggtgtaatagggaagtatgatagtagcccaaatgatgcttttgatatctggggccaaggg

SEQ ID NO: 7179 - protein, 43 aa, Artificial Sequence
  Description of Artificial Sequence: Synthetic antibody
NTLYIQMNSLRAEDTAVYYCARSGVIGKYDSSPNDAFDIWGQG

SEQ ID NO: 7180 - protein, 24 aa, Artificial Sequence
  Description of Artificial Sequence: Synthetic antibody
CAHTTNGILTGYYPDYYYYGMDVW

SEQ ID NO: 7181 - DNA, 129 bp, Artificial Sequence
  Description of Artificial Sequence: Synthetic antibody
gtccttacaatgaccagcatggaccctgtggacacagccacatattactgtgcacacaccactaacggtattttgactggttattatccggactactactactacggtatggacgtctggggccaaggg

SEQ ID NO: 7182 - protein, 43 aa, Artificial Sequence
  Description of Artificial Sequence: Synthetic antibody
VLTMTSMDPVDTATYYCAHTTNGILTGYYPDYYYYGMDVWGQG

SEQ ID NO: 7183 - DNA, 129 bp, Artificial Sequence
  Description of Artificial Sequence: Synthetic antibody
gtccttacaatgaccaacatggaccctgtggacacagccacatattactgtgcacacaccactaacggtattttgactggttattatccggactactactactacggtatggacgtctggggccaaggg

SEQ ID NO: 7184 - protein, 43 aa, Artificial Sequence
  Description of Artificial Sequence: Synthetic antibody
VLTMTNMDPVDTATYYCAHTTNGILTGYYPDYYYYGMDVWGQG

SEQ ID NO: 7185 - protein, 14 aa, Artificial Sequence
  Description of Artificial Sequence: Synthetic antibody
CVREDLNTPSFDLW

SEQ ID NO: 7186 - DNA, 129 bp, Artificial Sequence
  Description of Artificial Sequence: Synthetic antibody
ttctccagggacgacgccaagaactctctgtatcttcaaatcaatagcctgagagccgaggacacggccgtgtatttttgtgtcagagaggacctcaacacgccaagctttgacctctggggccaggga

SEQ ID NO: 7187 - protein, 43 aa, Artificial Sequence
  Description of Artificial Sequence: Synthetic antibody
FSRDDAKNSLYLQINSLRAEDTAVYFCVREDLNTPSFDLWGQG

SEQ ID NO: 7188 - DNA, 129 bp, Artificial Sequence
  Description of Artificial Sequence: Synthetic antibody
atctccagggacgacgccaagaactctctgtatcttcaaatcaatagcctgagagccgaggacacggccgtgtatttttgtgtcagagaggacctcaacacgccaagctttgacctctggggccaggga

SEQ ID NO: 7189 - protein, 43 aa, Artificial Sequence
  Description of Artificial Sequence: Synthetic antibody
ISRDDAKNSLYLQINSLRAEDTAVYFCVREDLNTPSFDLWGQG

SEQ ID NO: 7190 - protein, 15 aa, Artificial Sequence
  Description of Artificial Sequence: Synthetic antibody
CARDRRDYGLHFDYW

SEQ ID NO: 7191 - DNA, 129 bp, Artificial Sequence
  Description of Artificial Sequence: Synthetic antibody
accgcggacaaatccacgagcacagcctacatggagctgagcagcctgagatctgaggacacggccgtgtattactgtgcgagagatcggcgagactacggtctccactttgactactggggccaggga

SEQ ID NO: 7192 - protein, 43 aa, Artificial Sequence
  Description of Artificial Sequence: Synthetic antibody
TADKSTSTAYMELSSLRSEDTAVYYCARDRRDYGLHFDYWGQG

SEQ ID NO: 7193 - DNA, 129 bp, Artificial Sequence
  Description of Artificial Sequence: Synthetic antibody
accgcgcacaaatccacgagcacagcctacatggagctgagcagcctgatatctgaggacacggccgtgtattactgtgcgagagatcggcgagactacggtctccactttgactactggggccaggga

SEQ ID NO: 7194 - protein, 43 aa, Artificial Sequence
  Description of Artificial Sequence: Synthetic antibody
TAHKSTSTAYMELSSLISEDTAVYYCARDRRDYGLHFDYWGQG

SEQ ID NO: 7195 - protein, 17 aa, Artificial Sequence
  Description of Artificial Sequence: Synthetic antibody
CAKDGASGWPNWHFDLW

SEQ ID NO: 7196 - DNA, 129 bp, Artificial Sequence
  Description of Artificial Sequence: Synthetic antibody
tataattccaacaacacgctgtatctgcaaatgaacagcctgagagtcgaggacacggccgtatattactgtgcgaaagatggcgccagtggctggcccaactggcatttcgatctctggggccgtgga

SEQ ID NO: 7197 - protein, 43 aa, Artificial Sequence
  Description of Artificial Sequence: Synthetic antibody
YNSNNTLYLQMNSLRVEDTAVYYCAKDGASGWPNWHFDLWGRG

SEQ ID NO: 7198 - DNA, 129 bp, Artificial Sequence
  Description of Artificial Sequence: Synthetic antibody
gataattccaagaacacgctgtatctgcaaatgaacagcctgagagtcgaggacacggccgtatattactgtgcgaaagatggcgccagtggctggcccaactggcatttcgatctctggggccgtgga

SEQ ID NO: 7199 - protein, 43 aa, Artificial Sequence
  Description of Artificial Sequence: Synthetic antibody
DNSKNTLYLQMNSLRVEDTAVYYCAKDGASGWPNWHFDLWGRG

SEQ ID NO: 7200 - protein, 20 aa, Artificial Sequence
  Description of Artificial Sequence: Synthetic antibody
CARYSSSWYEEGGYYGMDVW

SEQ ID NO: 7201 - DNA, 129 bp, Artificial Sequence
  Description of Artificial Sequence: Synthetic antibody
aagaactcactgtatctgcaagtgaacagcctgagagacgaggacacggctgtgtattactgtgcgaggtatagcagcagctggtacgaggaggggggatactacggtatggacgtctggggccaaggg

SEQ ID NO: 7202 - protein, 43 aa, Artificial Sequence
  Description of Artificial Sequence: Synthetic antibody
KNSLYLQVNSLRDEDTAVYYCARYSSSWYEEGGYYGMDVWGQG

SEQ ID NO: 7203 - DNA, 129 bp, Artificial Sequence
  Description of Artificial Sequence: Synthetic antibody
aagaactcactgtatctgcaaatgaacagcctgagagacgaggacacggctgtgtattactgtgcgaggtatagcagcagctggtacgaggaggggggatactacggtatggacgtctggggccaaggg

SEQ ID NO: 7204 - protein, 43 aa, Artificial Sequence
  Description of Artificial Sequence: Synthetic antibody
KNSLYLQMNSLRDEDTAVYYCARYSSSWYEEGGYYGMDVWGQG

SEQ ID NO: 7205 - protein, 12 aa, Artificial Sequence
  Description of Artificial Sequence: Synthetic antibody
CAKDRLQSSDYW

SEQ ID NO: 7206 - DNA, 129 bp, Artificial Sequence
  Description of Artificial Sequence: Synthetic antibody
ttcaccatctccagagacaattccaagaatactctgtatctgcaaatgaacaacctgagagccgacgacacggccatatattactgtgcgaaagatcgcctacagtcctcagactactggggccaggga

SEQ ID NO: 7207 - protein, 43 aa, Artificial Sequence
  Description of Artificial Sequence: Synthetic antibody
FTISRDNSKNTLYLQMNNLRADDTAIYYCAKDRLQSSDYWGQG

SEQ ID NO: 7208 - DNA, 129 bp, Artificial Sequence
  Description of Artificial Sequence: Synthetic antibody
ttcaccatctccagagacaattccaagaacactctgtatctgcaaatgaacaacctgagagccgacgacacggccatatattactgtgcgaaagatcgcctacagtcctcagactactggggccaggga

SEQ ID NO: 7209 - protein, 17 aa, Artificial Sequence
  Description of Artificial Sequence: Synthetic antibody
CARSGNDYGSGGVLDYW

SEQ ID NO: 7210 - DNA, 129 bp, Artificial Sequence
  Description of Artificial Sequence: Synthetic antibody
gacaagtccatcagcaccgcctacctgcagtggagcagcctgaaggcctcggacaccgccatgtattactgtgcgagatcggggaacgactatggttcggggggagtgcttgactactggggccaggga

SEQ ID NO: 7211 - protein, 43 aa, Artificial Sequence
  Description of Artificial Sequence: Synthetic antibody
DKSISTAYLQWSSLKASDTAMYYCARSGNDYGSGGVLDYWGQG

SEQ ID NO: 7212 - DNA, 129 bp, Artificial Sequence
  Description of Artificial Sequence: Synthetic antibody
gacaagtccatcaccaccgcctacttgcagtggagcagcctgaaggcctcggacaccgccatgtattactgtgcgagatcggggaacgactatggttcggggggagtgcttgactactggggccaggga

SEQ ID NO: 7213 - protein, 43 aa, Artificial Sequence
  Description of Artificial Sequence: Synthetic antibody
DKSITTAYLQWSSLKASDTAMYYCARSGNDYGSGGVLDYWGQG

SEQ ID NO: 7214 - protein, 14 aa, Artificial Sequence
  Description of Artificial Sequence: Synthetic antibody
CARGGEVGNWFDPW

SEQ ID NO: 7215 - DNA, 129 bp, Artificial Sequence
  Description of Artificial Sequence: Synthetic antibody
atgaccacagacacatccacgagcacagcctacatggagctgaggagcctgagatctgacgacacggccgtgtattactgtgcgagagggggggaggtgggtaactggttcgacccctggggccaggga

SEQ ID NO: 7216 - protein, 43 aa, Artificial Sequence
  Description of Artificial Sequence: Synthetic antibody
MTTDTSTSTAYMELRSLRSDDTAVYYCARGGEVGNWFDPWGQG

SEQ ID NO: 7217 - DNA, 129 bp, Artificial Sequence
  Description of Artificial Sequence: Synthetic antibody
atgaccacacacacatccacgagcacagcctacatggagctgaggagcctgagatctgacgacacggccgtgtattactgtgcgagagggggggaggtgggtaactggttcgacccctggggccaggga

SEQ ID NO: 7218 - protein, 43 aa, Artificial Sequence
  Description of Artificial Sequence: Synthetic antibody
MTTHTSTSTAYMELRSLRSDDTAVYYCARGGEVGNWFDPWGQG

SEQ ID NO: 7219 - protein, 17 aa, Artificial Sequence
  Description of Artificial Sequence: Synthetic antibody
CARSGNDYGSGGVLDYR

SEQ ID NO: 7220 - DNA, 129 bp, Artificial Sequence
  Description of Artificial Sequence: Synthetic antibody
gacaagtccatcagcaccgcctacctgcagtggagcagcctgaaggcctcggacaccgccatgtattactgtgcgagatcggggaacgactatggttcggggggagtgcttgactaccggggccaggga

SEQ ID NO: 7221 - protein, 43 aa, Artificial Sequence
  Description of Artificial Sequence: Synthetic antibody
DKSISTAYLQWSSLKASDTAMYYCARSGNDYGSGGVLDYRGQG

SEQ ID NO: 7222 - DNA, 129 bp, Artificial Sequence
  Description of Artificial Sequence: Synthetic antibody
gacaagtccatcaccaccgcctacttgcagtggagcagcctgaaggcctcggacaccgccatgtattactgtgcgagatcggggaacgactatggttcggggggagtgcttgactaccggggccaggga

SEQ ID NO: 7223 - protein, 43 aa, Artificial Sequence
  Description of Artificial Sequence: Synthetic antibody
DKSITTAYLQWSSLKASDTAMYYCARSGNDYGSGGVLDYRGQG

SEQ ID NO: 7224 - protein, 13 aa, Artificial Sequence
  Description of Artificial Sequence: Synthetic antibody
CVKVGSGGYNANW

SEQ ID NO: 7225 - DNA, 129 bp, Artificial Sequence
  Description of Artificial Sequence: Synthetic antibody
tacatctcaagagatgattcagagaactcactgtatctgcaaatgagcagcctgaagaccgaggacacggccgtgtattattgtgttaaagtagggtcgggcggctacaatgcgaactggggccaggga

SEQ ID NO: 7226 - protein, 43 aa, Artificial Sequence
  Description of Artificial Sequence: Synthetic antibody
YISRDDSENSLYLQMSSLKTEDTAVYYCVKVGSGGYNANWGQG

SEQ ID NO: 7227 - DNA, 129 bp, Artificial Sequence
  Description of Artificial Sequence: Synthetic antibody
accatctcaagagatgattcagagaactcactgtatctgcaaatgagcagcctgaagaccgaggacacggccgtgtattattgtgttaaagtagggtcgggcggctacaatgcgaactggggccaggga

SEQ ID NO: 7228 - protein, 43 aa, Artificial Sequence
  Description of Artificial Sequence: Synthetic antibody
TISRDDSENSLYLQMSSLKTEDTAVYYCVKVGSGGYNANWGQG

SEQ ID NO: 7229 - protein, 19 aa, Artificial Sequence
  Description of Artificial Sequence: Synthetic antibody
CARGGCSGGSCYRDAFDIW

SEQ ID NO: 7230 - DNA, 129 bp, Artificial Sequence
  Description of Artificial Sequence: Synthetic antibody
tccaagaactcgctgtatcttcaaatgaacagcctgagagccgaggacacggccgtgtattactgtgcgagaggtggttgtagtggtggtagctgctaccgagatgcttttgatatctggggccaaggg

SEQ ID NO: 7231 - protein, 43 aa, Artificial Sequence
  Description of Artificial Sequence: Synthetic antibody
SKNSLYLQMNSLRAEDTAVYYCARGGCSGGSCYRDAFDIWGQG

SEQ ID NO: 7232 - DNA, 129 bp, Artificial Sequence
  Description of Artificial Sequence: Synthetic antibody
tccaagaacacgctgtatcttcaaatgaacagcctgagagccgaggacacggccgtgtattactgtgcgagaggtggttgtagtggtggtagctgctaccgagatgcttttgatatctggggccaaggg

SEQ ID NO: 7233 - protein, 43 aa, Artificial Sequence
  Description of Artificial Sequence: Synthetic antibody
SKNTLYLQMNSLRAEDTAVYYCARGGCSGGSCYRDAFDIWGQG

SEQ ID NO: 7234 - protein, 17 aa, Artificial Sequence
  Description of Artificial Sequence: Synthetic antibody
CARVVVPATPDSYFDYW

SEQ ID NO: 7235 - DNA, 129 bp, Artificial Sequence
  Description of Artificial Sequence: Synthetic antibody
gacacgtccatcagcacagcctacatggagctgagcaggctgagatctgacgacacggccgtgtattactgtgcgagagtggtagtaccagcgacgccggactcgtactttgactactggggccaggga

SEQ ID NO: 7236 - protein, 43 aa, Artificial Sequence
  Description of Artificial Sequence: Synthetic antibody
DTSISTAYMELSRLRSDDTAVYYCARVVVPATPDSYFDYWGQG

SEQ ID NO: 7237 - DNA, 129 bp, Artificial Sequence
  Description of Artificial Sequence: Synthetic antibody
gacacgtccatcagcacagcctacatggagctaagcaggctgagatctgacgacacggccgtgtattactgtgcgagagtggtagtaccagcgacgccggactcgtactttgactactggggccaggga

SEQ ID NO: 7238 - protein, 21 aa, Artificial Sequence
  Description of Artificial Sequence: Synthetic antibody
CARDDQDIVATTGIPRGMDVW

SEQ ID NO: 7239 - DNA, 129 bp, Artificial Sequence
  Description of Artificial Sequence: Synthetic antibody
tgcacagcctacttggagctgagcagcctgagatctgaggacacggccgtgtattactgtgcgagagacgaccaagatatagtggctacgaccgggatcccacggggtatggacgtctggggccaaggg

SEQ ID NO: 7240 - protein, 43 aa, Artificial Sequence
  Description of Artificial Sequence: Synthetic antibody
CTAYLELSSLRSEDTAVYYCARDDQDIVATTGIPRGMDVWGQG

SEQ ID NO: 7241 - DNA, 129 bp, Artificial Sequence
  Description of Artificial Sequence: Synthetic antibody
agcacagcctacatggagctgagcagcctgagatctgaggacacggccgtgtattactgtgcgagagacgaccaagatatagtggctacgaccgggatcccacggggtatggacgtctggggccaaggg

SEQ ID NO: 7242 - protein, 43 aa, Artificial Sequence
  Description of Artificial Sequence: Synthetic antibody
STAYMELSSLRSEDTAVYYCARDDQDIVATTGIPRGMDVWGQG

SEQ ID NO: 7243 - protein, 14 aa, Artificial Sequence
  Description of Artificial Sequence: Synthetic antibody
CARGGAGAVTQDYW

SEQ ID NO: 7244 - DNA, 129 bp, Artificial Sequence
  Description of Artificial Sequence: Synthetic antibody
attaccgcggacaaatccacgagcacagcctacatggagctgagcagcctgagatctgaggacacggccgtgtattactgtgcgagagggggtgcgggggcggtgactcaggactactggggccaggga

SEQ ID NO: 7245 - protein, 43 aa, Artificial Sequence
  Description of Artificial Sequence: Synthetic antibody
ITADKSTSTAYMELSSLRSEDTAVYYCARGGAGAVTQDYWGQG

SEQ ID NO: 7246 - DNA, 129 bp, Artificial Sequence
  Description of Artificial Sequence: Synthetic antibody
attaccgcgcacaaatccacgagcacagcctacatggagctgagcagcctgagatctgaggacacggccgtgtattactgtgcgagagggggtgcgggggcggtgactcaggactactggggccaggga

SEQ ID NO: 7247 - protein, 43 aa, Artificial Sequence
  Description of Artificial Sequence: Synthetic antibody
ITAHKSTSTAYMELSSLRSEDTAVYYCARGGAGAVTQDYWGQG

SEQ ID NO: 7248 - protein, 12 aa, Artificial Sequence
  Description of Artificial Sequence: Synthetic antibody
CARGGPHYFDYW

SEQ ID NO: 7249 - DNA, 129 bp, Artificial Sequence
  Description of Artificial Sequence: Synthetic antibody
ttcaccatctccagagaaaatgccaagaactccttgtatcttcaaatgaacagcctgggagccggggacacggctgtgtattactgtgcaagaggcggtccccactactttgactactggggccaggga

SEQ ID NO: 7250 - protein, 43 aa, Artificial Sequence
  Description of Artificial Sequence: Synthetic antibody
FTISRENAKNSLYLQMNSLGAGDTAVYYCARGGPHYFDYWGQG

SEQ ID NO: 7251 - DNA, 129 bp, Artificial Sequence
  Description of Artificial Sequence: Synthetic antibody
ttcaccatctccagagaaaatgccaagaactccttgtatcttcaaatgaacagcctgagagccggggacacggctgtgtattactgtgcaagaggcggtccccactactttgactactggggccaggga

SEQ ID NO: 7252 - protein, 43 aa, Artificial Sequence
  Description of Artificial Sequence: Synthetic antibody
FTISRENAKNSLYLQMNSLRAGDTAVYYCARGGPHYFDYWGQG

SEQ ID NO: 7253 - protein, 12 aa, Artificial Sequence
  Description of Artificial Sequence: Synthetic antibody
CARLRSGSLDYW

SEQ ID NO: 7254 - DNA, 129 bp, Artificial Sequence
  Description of Artificial Sequence: Synthetic antibody
gtcaccgtattcgtagacacgcccaagaaccagttctccctgtggctgagctctgtgaccgccgcagacacggctgtgtattactgtgcgagacttcgcagtgggagccttgactactggggccaggga

SEQ ID NO: 7255 - protein, 43 aa, Artificial Sequence
  Description of Artificial Sequence: Synthetic antibody
VTVFVDTPKNQFSLWLSSVTAADTAVYYCARLRSGSLDYWGQG

SEQ ID NO: 7256 - DNA, 129 bp, Artificial Sequence
  Description of Artificial Sequence: Synthetic antibody
gtcaccgtatccgtagacacgtccaagaaccagttctccctgtggctgagctctgtgaccgccgcagacacggctgtgtattactgtgcgagacttcgcagtgggagccttgactactggggccaggga

SEQ ID NO: 7257 - protein, 43 aa, Artificial Sequence
  Description of Artificial Sequence: Synthetic antibody
VTVSVDTSKNQFSLWLSSVTAADTAVYYCARLRSGSLDYWGQG

SEQ ID NO: 7258 - protein, 11 aa, Artificial Sequence [sequence omitted]

SEQ ID NO: 7259 - DNA, 129 bp, Artificial Sequence
  Description of Artificial Sequence: Synthetic antibody
caggctcaccatcaccaaggacacctccaaaaccaggtggtccttacaatgaccaacatggaccctgtggacacagccacatattactgtgcacacaggttaggctggttcgacccctggggccaggga

SEQ ID NO: 7260 - protein, 43 aa, Artificial Sequence
  Description of Artificial Sequence: Synthetic antibody
QAHHHQGHLQNQVVLTMTNMDPVDTATYYCAHRLGWFDPWGQG

SEQ ID NO: 7261 - DNA, 129 bp, Artificial Sequence
  Description of Artificial Sequence: Synthetic antibody
aggctcaccatcaccaaggacacctccaaaaaccaggtggtccttacaatgaccaacatggaccctgtggacacagccacatattactgtgcacacaggttaggctggttcgacccctggggccaggga

SEQ ID NO: 7262 - protein, 43 aa, Artificial Sequence
  Description of Artificial Sequence: Synthetic antibody
RLTITKDTSKNQVVLTMTNMDPVDTATYYCAHRLGWFDPWGQG

SEQ ID NO: 7263 - protein, 16 aa, Artificial Sequence
  Description of Artificial Sequence: Synthetic antibody
CAQAYYYDSSGYFGYW

SEQ ID NO: 7264 - DNA, 129 bp, Artificial Sequence
  Description of Artificial Sequence: Synthetic antibody
caaggacacctccaaaaccaggtggtccttacactgaccaacatggaccctgtggacacagccacatattactgtgcacaggcgtattactatgatagtagtggttactttggctactgggaccaggga

SEQ ID NO: 7265 - protein, 43 aa, Artificial Sequence
  Description of Artificial Sequence: Synthetic antibody
QGHLQNQVVLTLTNMDPVDTATYYCAQAYYYDSSGYFGYWDQG

SEQ ID NO: 7266 - DNA, 129 bp, Artificial Sequence
  Description of Artificial Sequence: Synthetic antibody
aaggacacctccaaaaaccaggtggtccttacactgaccaacatggaccctgtggacacagccacatattactgtgcacaggcgtattactatgatagtagtggttactttggctactgggaccaggga

SEQ ID NO: 7267 - protein, 43 aa, Artificial Sequence
  Description of Artificial Sequence: Synthetic antibody
KDTSKNQVVLTLTNMDPVDTATYYCAQAYYYDSSGYFGYWDQG

SEQ ID NO: 7268 - protein, 25 aa, Artificial Sequence
  Description of Artificial Sequence: Synthetic antibody
CARVCCGITMIVVVIPGSNYYFDYW

SEQ ID NO: 7269 - DNA, 129 bp, Artificial Sequence
  Description of Artificial Sequence: Synthetic antibody
ttggagctgaggagcctgagatctgacgacacggccgtgtattactgtgcgagagtctgttgtggtattactatgatagtagtggttattcctggctccaactactactttgactactggggccaggga

SEQ ID NO: 7270 - protein, 43 aa, Artificial Sequence
  Description of Artificial Sequence: Synthetic antibody
LELRSLRSDDTAVYYCARVCCGITMIVVVIPGSNYYFDYWGQG

SEQ ID NO: 7271 - DNA, 129 bp, Artificial Sequence
  Description of Artificial Sequence: Synthetic antibody
atggagctgaggagcctgagatctgacgacacggccgtgtattactgtgcgagagtctgttgtggtattactatgatagtagtggttattcctggctccaactactactttgactactggggccaggga

SEQ ID NO: 7272 - protein, 43 aa, Artificial Sequence
  Description of Artificial Sequence: Synthetic antibody
MELRSLRSDDTAVYYCARVCCGITMIVVVIPGSNYYFDYWGQG

SEQ ID NO: 7273 - protein, 21 aa, Artificial Sequence
  Description of Artificial Sequence: Synthetic antibody
CARMRMVRGGDYYYYYGMDVW

SEQ ID NO: 7274 - DNA, 129 bp, Artificial Sequence
  Description of Artificial Sequence: Synthetic antibody
tgcacagcctacttggagctgaggagcctgagatctgacgacacggccgtgtattactgtgcgagaatgaggatggttcggggaggtgattactactactactacggtatggacgtctggggccaaggg

SEQ ID NO: 7275 - protein, 43 aa, Artificial Sequence
  Description of Artificial Sequence: Synthetic antibody
CTAYLELRSLRSDDTAVYYCARMRMVRGGDYYYYYGMDVWGQG

SEQ ID NO: 7276 - DNA, 129 bp, Artificial Sequence
  Description of Artificial Sequence: Synthetic antibody
agcacagcctacatggagctgaggagcctgagatctgacgacacggccgtgtattactgtgcgagaatgaggatggttcggggaggtgattactactactactacggtatggacgtctggggccaaggg

SEQ ID NO: 7277 - protein, 43 aa, Artificial Sequence
  Description of Artificial Sequence: Synthetic antibody
STAYMELRSLRSDDTAVYYCARMRMVRGGDYYYYYGMDVWGQG

SEQ ID NO: 7278 - protein, 22 aa, Artificial Sequence
  Description of Artificial Sequence: Synthetic antibody
CAHRLRGSNVLLWFGDYGMDVW

SEQ ID NO: 7279 - DNA, 129 bp, Artificial Sequence
  Description of Artificial Sequence: Synthetic antibody
caggtggtccttacaatgaccaacatggaccctgtggacacagccgcatattactgtgcacacagactgcgaggaagcaacgtgttactatggttcggggactacggtatggacgtctggggccaaggg

SEQ ID NO: 7280 - protein, 43 aa, Artificial Sequence
  Description of Artificial Sequence: Synthetic antibody
QVVLTMTNMDPVDTAAYYCAHRLRGSNVLLWFGDYGMDVWGQG

SEQ ID NO: 7281 - DNA, 129 bp, Artificial Sequence
  Description of Artificial Sequence: Synthetic antibody
caggtggtccttacaatgaccaacatggaccctgtggacacagccacatattactgtgcacacagactgcgaggaagcaacgtattactatggttcggggactacggtatggacgtctggggccaaggg

SEQ ID NO: 7282 - protein, 43 aa, Artificial Sequence
  Description of Artificial Sequence: Synthetic antibody
QVVLTMTNMDPVDTATYYCAHRLRGSNVLLWFGDYGMDVWGQG

SEQ ID NO: 7283 - protein, 16 aa, Artificial Sequence
  Description of Artificial Sequence: Synthetic antibody
CARVRAVTQKNWFDPW

SEQ ID NO: 7284 - DNA, 129 bp, Artificial Sequence
  Description of Artificial Sequence: Synthetic antibody
agggacacgtccgtcagcacagcctacatggagctgagcaggctgagatctgacgacacggccgcgtattactgtgcgagagtccgggcggtgactcagaagaactggttcgacccctggggccaggga

SEQ ID NO: 7285 - protein, 43 aa, Artificial Sequence
  Description of Artificial Sequence: Synthetic antibody
RDTSVSTAYMELSRLRSDDTAAYYCARVRAVTQKNWFDPWGQG

SEQ ID NO: 7286 - DNA, 129 bp, Artificial Sequence
  Description of Artificial Sequence: Synthetic antibody
agggacacgtccatcagcacagcctacatggagctgagcaggctgagatctgacgacacggccgtgtattactgtgcgagagtccgggcggtgactcagaagaactggttcgacccctggggccaggga

SEQ ID NO: 7287 - protein, 43 aa, Artificial Sequence
  Description of Artificial Sequence: Synthetic antibody
RDTSISTAYMELSRLRSDDTAVYYCARVRAVTQKNWFDPWGQG

SEQ ID NO: 7288 - protein, 24 aa, Artificial Sequence
  Description of Artificial Sequence: Synthetic antibody
CARESALGYCSGGSCYSGTDFDYW

SEQ ID NO: 7289 - DNA, 129 bp, Artificial Sequence
  Description of Artificial Sequence: Synthetic antibody
tttctgaaaatgaacggtctgagagccgaggacacggctgtgtattactgtgcaagagagtcggccttaggatattgtagtggtggtagctgctactccggcacggactttgactactggggccaggga

SEQ ID NO: 7290 - protein, 43 aa, Artificial Sequence
  Description of Artificial Sequence: Synthetic antibody
FLKMNGLRAEDTAVYYCARESALGYCSGGSCYSGTDFDYWGQG

SEQ ID NO: 7291 - DNA, 129 bp, Artificial Sequence
  Description of Artificial Sequence: Synthetic antibody
tatctgcaaatgaacggtctgagagccgaggacacggctgtgtattactgtgcaagagagtcggccttaggatattgtagtggtggtagctgctactccggcacggactttgactactggggccaggga

SEQ ID NO: 7292 - protein, 43 aa, Artificial Sequence
  Description of Artificial Sequence: Synthetic antibody
YLQMNGLRAEDTAVYYCARESALGYCSGGSCYSGTDFDYWGQG

SEQ ID NO: 7293 - protein, 15 aa, Artificial Sequence
  Description of Artificial Sequence: Synthetic antibody
CARVPVGDYYGMDVW

SEQ ID NO: 7294 - DNA, 129 bp, Artificial Sequence
  Description of Artificial Sequence: Synthetic antibody
tccagagaaaatgccaagaactccttgtatcttcaaatgaacagcctgagagccggggacacggctgtgtattactgtgcaagagtccccgtcggtgactactacggtatggacgtctggggccaaggg

SEQ ID NO: 7295 - protein, 43 aa, Artificial Sequence
  Description of Artificial Sequence: Synthetic antibody
SRENAKNSLYLQMNSLRAGDTAVYYCARVPVGDYYGMDVWGQG

SEQ ID NO: 7296 - DNA, 129 bp, Artificial Sequence
  Description of Artificial Sequence: Synthetic antibody
tacagagaaaatgccaagaactccttgtatcttcaaatgaacagcctgagagccggtgacacggctgtgtattactgtgcaagagtccccgtcggtgactactacggtatggacgtctggggccaaggg

SEQ ID NO: 7297 - protein, 43 aa, Artificial Sequence
  Description of Artificial Sequence: Synthetic antibody
YRENAKNSLYLQMNSLRAGDTAVYYCARVPVGDYYGMDVWGQG

SEQ ID NO: 7298 - protein, 25 aa, Artificial Sequence
  Description of Artificial Sequence: Synthetic antibody
CARGTDYYGSGSYYNSYYYYGMDVW

SEQ ID NO: 7299 - DNA, 129 bp, Artificial Sequence
  Description of Artificial Sequence: Synthetic antibody
ttggagctgagcagcctgagatctgaggacacggccgtgtattactgtgcgagagggacggattactatggttcagggagttattataacagttactactactacggtatggacgtctggggccaaggg

SEQ ID NO: 7300 - protein, 43 aa, Artificial Sequence
  Description of Artificial Sequence: Synthetic antibody
LELSSLRSEDTAVYYCARGTDYYGSGSYYNSYYYYGMDVWGQG

SEQ ID NO: 7301 - DNA, 129 bp, Artificial Sequence
  Description of Artificial Sequence: Synthetic antibody
atggagctgagcagcctgagatctgaggacacggccgtgtattactgtgcgagagggacggattactatggttcagggagttattataacagttactactactacggtatggacgtctggggccaaggg

SEQ ID NO: 7302 - protein, 43 aa, Artificial Sequence
  Description of Artificial Sequence: Synthetic antibody
MELSSLRSEDTAVYYCARGTDYYGSGSYYNSYYYYGMDVWGQG

SEQ ID NO: 7303 - protein, 13 aa, Artificial Sequence
  Description of Artificial Sequence: Synthetic antibody
CARPLVDDAFDIW

SEQ ID NO: 7304 - DNA, 129 bp, Artificial Sequence
  Description of Artificial Sequence: Synthetic antibody
accatctcagccgacaagtccatcagcaccgcctacctgcagtggagcagcctgaaggcctcggacaccgccatgtattactgtgcgagaccccttgtcgatgatgcttttgatatctggggccaaggg

SEQ ID NO: 7305 - protein, 43 aa, Artificial Sequence
  Description of Artificial Sequence: Synthetic antibody
TISADKSISTAYLQWSSLKASDTAMYYCARPLVDDAFDIWGQG

SEQ ID NO: 7306 - DNA, 129 bp, Artificial Sequence
  Description of Artificial Sequence: Synthetic antibody
accatctcagccgacaagtccatcagcaccgcctacctgcagtggagcagcctgaaggcctcggacaccgccacgtactactgtgcgagaccccttgtcgatgatgcttttgatatctggggccaaggg

SEQ ID NO: 7307 - protein, 43 aa, Artificial Sequence
  Description of Artificial Sequence: Synthetic antibody
TISADKSISTAYLQWSSLKASDTATYYCARPLVDDAFDIWGQG

SEQ ID NO: 7308 - protein, 17 aa, Artificial Sequence
  Description of Artificial Sequence: Synthetic antibody
CAKDFQWLRIGGGFDYW

SEQ ID NO: 7309 - DNA, 129 bp, Artificial Sequence
  Description of Artificial Sequence: Synthetic antibody
gacaattccaggaacacgctgtatctgcaaatgaacagcctgagagccgaggacacggctatgtattactgtgcgaaagattttcagtggttacgaattggggggggttttgactactggggccaggga

SEQ ID NO: 7310 - protein, 43 aa, Artificial Sequence
  Description of Artificial Sequence: Synthetic antibody
DNSRNTLYLQMNSLRAEDTAMYYCAKDFQWLRIGGGFDYWGQG

SEQ ID NO: 7311 - DNA, 129 bp, Artificial Sequence
  Description of Artificial Sequence: Synthetic antibody
gacaattccagcaacacgctgtatctgcaaatgaacagcctgagagccgaggacacggctatgtattactgtgcgaaagattttcagtggttacgaattggggggggttttgactactggggccaggga

SEQ ID NO: 7312 - protein, 43 aa, Artificial Sequence
  Description of Artificial Sequence: Synthetic antibody
DNSSNTLYLQMNSLRAEDTAMYYCAKDFQWLRIGGGFDYWGQG

SEQ ID NO: 7313 - protein, 13 aa, Artificial Sequence
  Description of Artificial Sequence: Synthetic antibody
CARGRGTHWFDPW

SEQ ID NO: 7314 - DNA, 129 bp, Artificial Sequence
  Description of Artificial Sequence: Synthetic antibody
accatgaccaggaacacctccataagcacagcctacatggagctgagcagcctgagatctgaggacacggccgtgtattactgtgcgagaggccggggtacacactggttcgacccctggggccaggga

SEQ ID NO: 7315 - protein, 43 aa, Artificial Sequence
  Description of Artificial Sequence: Synthetic antibody
TMTRNTSISTAYMELSSLRSEDTAVYYCARGRGTHWFDPWGQG

SEQ ID NO: 7316 - DNA, 129 bp, Artificial Sequence
  Description of Artificial Sequence: Synthetic antibody
accatgaccagcaacacctccataagcacagcctacatggagctgagcagcctgagatctgaggacacggccgtgtattactgtgcgagaggccggggtacacactggttcgacccctggggccaggga

SEQ ID NO: 7317 - protein, 43 aa, Artificial Sequence
  Description of Artificial Sequence: Synthetic antibody
TMTSNTSISTAYMELSSLRSEDTAVYYCARGRGTHWFDPWGQG

SEQ ID NO: 7318 - protein, 21 aa, Artificial Sequence
  Description of Artificial Sequence: Synthetic antibody
CARYPRALGGLGRALAPSDYW

SEQ ID NO: 7319 - DNA, 129 bp, Artificial Sequence
  Description of Artificial Sequence: Synthetic antibody
tgcacagcctacatggagctgaggagcctgagatctgacgacacggccgtatattactgtgcgagataccctcgggccctgggaggtttgggtcgggcactggccccctctgactactggggccaggga

SEQ ID NO: 7320 - protein, 43 aa, Artificial Sequence
  Description of Artificial Sequence: Synthetic antibody
CTAYMELRSLRSDDTAVYYCARYPRALGGLGRALAPSDYWGQG

SEQ ID NO: 7321 - DNA, 129 bp, Artificial Sequence
  Description of Artificial Sequence: Synthetic antibody
agcacagcctacatggagctgaggagcctgagatctgacgacacggccgtatattactgtgcgagataccctcgggccctgggaggtttgggtcgggcactggccccctctgactactggggccaggga

SEQ ID NO: 7322 - protein, 43 aa, Artificial Sequence
  Description of Artificial Sequence: Synthetic antibody
STAYMELRSLRSDDTAVYYCARYPRALGGLGRALAPSDYWGQG

SEQ ID NO: 7323 - protein, 21 aa, Artificial Sequence
  Description of Artificial Sequence: Synthetic antibody
CARDQRIAAADYYYYYGMDVW

SEQ ID NO: 7324 - DNA, 129 bp, Artificial Sequence
  Description of Artificial Sequence: Synthetic antibody
tgcacagtctacttggagctgagcagcctgagatctgaggacacggccgtgtattactgtgcgagagatcagaggatagcagcagctgattactactactactacggtatggacgtctggggccaaggg

SEQ ID NO: 7325 - protein, 43 aa, Artificial Sequence
  Description of Artificial Sequence: Synthetic antibody
CTVYLELSSLRSEDTAVYYCARDQRIAAADYYYYYGMDVWGQG

SEQ ID NO: 7326 - DNA, 129 bp, Artificial Sequence
  Description of Artificial Sequence: Synthetic antibody
agcacagtctacatggagctgagcagcctgagatctgaggacacggccgtgtattactgtgcgagagatcagaggatagcagcagctgattactactactactacggtatggacgtctggggccaaggg

SEQ ID NO: 7327 - protein, 43 aa, Artificial Sequence
  Description of Artificial Sequence: Synthetic antibody
STVYMELSSLRSEDTAVYYCARDQRIAAADYYYYYGMDVWGQG

SEQ ID NO: 7328 - protein, 25 aa, Artificial Sequence
  Description of Artificial Sequence: Synthetic antibody
CAKFDYWIDYYGSGSYGTGGYFDYW

SEQ ID NO: 7329 - DNA, 129 bp, Artificial Sequence
  Description of Artificial Sequence: Synthetic antibody
ctgcaaatgaacagcctgagagccgaggacacggccgtatattactgtgcgaagttcgactactggatagattactatggttcggggagttatggaacgggtggctactttgactactggggccaggga

SEQ ID NO: 7330 - protein, 43 aa, Artificial Sequence
  Description of Artificial Sequence: Synthetic antibody
LQMNSLRAEDTAVYYCAKFDYWIDYYGSGSYGTGGYFDYWGQG

SEQ ID NO: 7331 - DNA, 129 bp, Artificial Sequence
  Description of Artificial Sequence: Synthetic antibody
ctgaaaatgaactgcctgagagccgaggacacggccgtatattactgtgcgaagttcgactactggatagattactatggttcggggagttatggaacgggtggctactttgactactggggccaggga

SEQ ID NO: 7332 - protein, 43 aa, Artificial Sequence
  Description of Artificial Sequence: Synthetic antibody
LKMNCLRAEDTAVYYCAKFDYWIDYYGSGSYGTGGYFDYWGQG

SEQ ID NO: 7333 - protein, 19 aa, Artificial Sequence
  Description of Artificial Sequence: Synthetic antibody
CVKGTIPIFGVIRSAFDYW

SEQ ID NO: 7334 - DNA, 129 bp, Artificial Sequence
  Description of Artificial Sequence: Synthetic antibody
gccaagaactccctgtatgtgcaattgaacagtctgagatctgaggacacggccttgtattattgtgtaaaagggactattccgatctttggagtgattaggagcgcttttgactactggggccagggg

SEQ ID NO: 7335 - protein, 43 aa, Artificial Sequence
  Description of Artificial Sequence: Synthetic antibody
AKNSLYVQLNSLRSEDTALYYCVKGTIPIFGVIRSAFDYWGQG

SEQ ID NO: 7336 - DNA, 129 bp, Artificial Sequence
  Description of Artificial Sequence: Synthetic antibody
cgccaagaactcctgtatgtgcaattgaacagtctgagatctgaggacacggccttgtattattgtgtaaaagggactattccgatctttggagtgattaggagcgcttttgactactggggccagggg

SEQ ID NO: 7337 - protein, 43 aa, Artificial Sequence
  Description of Artificial Sequence: Synthetic antibody
RQELLYVQLNSLRSEDTALYYCVKGTIPIFGVIRSAFDYWGQG

SEQ ID NO: 7338 - protein, 15 aa, Artificial Sequence
  Description of Artificial Sequence: Synthetic antibody
CARSGYSSGWYGDYW

SEQ ID NO: 7339 - DNA, 129 bp, Artificial Sequence
  Description of Artificial Sequence: Synthetic antibody
tacagggacatgtccacgaggacagtctacatggagctgagcagcctgagatctgaggacacggccgtgtattactgtgcgagatccggatatagcagtggctggtacggagactactggggccaggga

SEQ ID NO: 7340 - protein, 43 aa, Artificial Sequence
  Description of Artificial Sequence: Synthetic antibody
YRDMSTRTVYMELSSLRSEDTAVYYCARSGYSSGWYGDYWGQG

SEQ ID NO: 7341 - DNA, 129 bp, Artificial Sequence
  Description of Artificial Sequence: Synthetic antibody
accagggacatgtccacgaggacagtctacatggagctgagcagcctgagatctgaggacacggccgtgtattactgtgcgagatccggatatagcagtggctggtacggagactactggggccaggga

SEQ ID NO: 7342 - protein, 43 aa, Artificial Sequence
  Description of Artificial Sequence: Synthetic antibody
TRDMSTRTVYMELSSLRSEDTAVYYCARSGYSSGWYGDYWGQG

SEQ ID NO: 7343 - protein, 13 aa, Artificial Sequence
  Description of Artificial Sequence: Synthetic antibody
CAHRRPWDYFDYW

SEQ ID NO: 7344 - DNA, 129 bp, Artificial Sequence
  Description of Artificial Sequence: Synthetic antibody
caccatcaccaaggacacctccaaaaccaggtggtccttacaatgaccaacatggaccctgtggacacagccacatattactgtgcacacagacgtccctgggactactttgactactggggccaggga

SEQ ID NO: 7345 - protein, 43 aa, Artificial Sequence
  Description of Artificial Sequence: Synthetic antibody
HHHQGHLQNQVVLTMTNMDPVDTATYYCAHRRPWDYFDYWGQG

SEQ ID NO: 7346 - DNA, 129 bp, Artificial Sequence
  Description of Artificial Sequence: Synthetic antibody
accatcaccaaggacacctccaaaaaccaggtggtccttacaatgaccaacatggaccctgtggacacagccacatattactgtgcacacagacgtccctgggactactttgactactggggccaggga

SEQ ID NO: 7347 - protein, 43 aa, Artificial Sequence
  Description of Artificial Sequence: Synthetic antibody
TITKDTSKNQVVLTMTNMDPVDTATYYCAHRRPWDYFDYWGQG

SEQ ID NO: 7348 - protein, 19 aa, Artificial Sequence
  Description of Artificial Sequence: Synthetic antibody
CARGGYYGSGSRGDWFDPW

SEQ ID NO: 7349 - DNA, 129 bp, Artificial Sequence
  Description of Artificial Sequence: Synthetic antibody
tccaagaacctgttctccctgaagctgagctctgtgaccgccgcggacacggccgtgtattactgtgcgagaggcggttactatggttcagggagtagaggggactggttcgacccctggggccaggga

SEQ ID NO: 7350 - protein, 43 aa, Artificial Sequence
  Description of Artificial Sequence: Synthetic antibody
SKNLFSLKLSSVTAADTAVYYCARGGYYGSGSRGDWFDPWGQG

SEQ ID NO: 7351 - DNA, 129 bp, Artificial Sequence
  Description of Artificial Sequence: Synthetic antibody
tccaagaaccagttctccctgaagctgagctctgtgaccgccgcggacacggccgtgtattactgtgcgagaggcggttactatggttcagggagtagaggggactggttcgacccctggggccaggga

SEQ ID NO: 7352 - protein, 43 aa, Artificial Sequence
  Description of Artificial Sequence: Synthetic antibody
SKNQFSLKLSSVTAADTAVYYCARGGYYGSGSRGDWFDPWGQG

SEQ ID NO: 7353 - protein, 16 aa, Artificial Sequence
  Description of Artificial Sequence: Synthetic antibody
CARRGVRPFSDGMDVW

SEQ ID NO: 7354 - DNA, 129 bp, Artificial Sequence
  Description of Artificial Sequence: Synthetic antibody
caaggacacctccaaaaccaggtggtccttacaatgaccaacatggaccctgtggacacagccacatattactgtgcacgccgcggtgtacgtcccttctctgacggtatggacgtctggggccaaggg

SEQ ID NO: 7355 - protein, 43 aa, Artificial Sequence
  Description of Artificial Sequence: Synthetic antibody
QGHLQNQVVLTMTNMDPVDTATYYCARRGVRPFSDGMDVWGQG

SEQ ID NO: 7356 - DNA, 129 bp, Artificial Sequence
  Description of Artificial Sequence: Synthetic antibody
aaggacacctccaaaaaccaggtggtccttacaatgaccaacatggaccctgtggacacagccacatattactgtgcacgccgcggtgtacgtcccttctctgacggtatggacgtctggggccaaggg

SEQ ID NO: 7357 - protein, 43 aa, Artificial Sequence
  Description of Artificial Sequence: Synthetic antibody
KDTSKNQVVLTMTNMDPVDTATYYCARRGVRPFSDGMDVWGQG

SEQ ID NO: 7358 - protein, 21 aa, Artificial Sequence
  Description of Artificial Sequence: Synthetic antibody
CARDGLIVGATTGPSWYFDLW

SEQ ID NO: 7359 - DNA, 129 bp, Artificial Sequence
  Description of Artificial Sequence: Synthetic antibody
tgcacagtctacatggagctgagcagcctgagatctgaggacacggccgtgtattactgtgcgagagatggtcttatagtgggagctaccacgggcccctcgtggtacttcgatctctggggccgtggc

SEQ ID NO: 7360 - protein, 43 aa, Artificial Sequence
  Description of Artificial Sequence: Synthetic antibody
CTVYMELSSLRSEDTAVYYCARDGLIVGATTGPSWYFDLWGRG

SEQ ID NO: 7361 - DNA, 129 bp, Artificial Sequence
  Description of Artificial Sequence: Synthetic antibody
agcacagtctacatggagctgagcagcctgagatctgaggacacggccgtgtattactgtgcgagagatggtcttatagtgggagctaccacgggcccctcgtggtacttcgatctctggggccgtggc

SEQ ID NO: 7362 - protein, 43 aa, Artificial Sequence
  Description of Artificial Sequence: Synthetic antibody
STVYMELSSLRSEDTAVYYCARDGLIVGATTGPSWYFDLWGRG

SEQ ID NO: 7363 - protein, 20 aa, Artificial Sequence
  Description of Artificial Sequence: Synthetic antibody
CARDRDYITATYYYYGMDVW

SEQ ID NO: 7364 - DNA, 129 bp, Artificial Sequence
  Description of Artificial Sequence: Synthetic antibody
acgagcacggcctacatggagctgaggagcctgagatctgacgacacggccgtgtattactgtgcgagagatcgggactacataaccgcaacctactactactacggtatggacgtctggggccaaggg

SEQ ID NO: 7365 - protein, 43 aa, Artificial Sequence
  Description of Artificial Sequence: Synthetic antibody
TSTAYMELRSLRSDDTAVYYCARDRDYITATYYYYGMDVWGQG

SEQ ID NO: 7366 - DNA, 129 bp, Artificial Sequence
  Description of Artificial Sequence: Synthetic antibody
acgagcacagcctacatggagctgaggagcctgagatctgacgacacggccgtgtattactgtgcgagagatcgggactacataaccgcaacctactactactacggtatggacgtctggggccaaggg

SEQ ID NO: 7367 - protein, 15 aa, Artificial Sequence
  Description of Artificial Sequence: Synthetic antibody
CAKDSHDILTGPDYW

SEQ ID NO: 7368 - DNA, 129 bp, Artificial Sequence
  Description of Artificial Sequence: Synthetic antibody
tccagagacaacgccaagaactccctgtatctgcaaatgaacagtctgagagctgaggacacggccttgtattactgtgcaaaagatagtcacgatattttgactggtcctgactactggggccaggga

SEQ ID NO: 7369 - protein, 43 aa, Artificial Sequence
  Description of Artificial Sequence: Synthetic antibody
SRDNAKNSLYLQMNSLRAEDTALYYCAKDSHDILTGPDYWGQG

SEQ ID NO: 7370 - DNA, 129 bp, Artificial Sequence
  Description of Artificial Sequence: Synthetic antibody
tacagagacaacgccaagaactccctgtatctgcaaatgaacagtctgagagctgaggacactgccttgtattactgtgcaaaagatagtcacgatattttgactggtcctgactactggggccaggga

SEQ ID NO: 7371 - protein, 43 aa, Artificial Sequence
  Description of Artificial Sequence: Synthetic antibody
YRDNAKNSLYLQMNSLRAEDTALYYCAKDSHDILTGPDYWGQG

SEQ ID NO: 7372 - protein, 17 aa, Artificial Sequence
  Description of Artificial Sequence: Synthetic antibody
CARAEYYYDSSGYFDYW

SEQ ID NO: 7373 - DNA, 129 bp, Artificial Sequence
  Description of Artificial Sequence: Synthetic antibody
ggcaattccaagaacacgctgtatcttcaaatgaacagcctgagagccgaggacacggccgtgtattactgtgcgagagcagaatattactatgatagtagtggttattttgactactggggccaggga

SEQ ID NO: 7374 - protein, 43 aa, Artificial Sequence
  Description of Artificial Sequence: Synthetic antibody
GNSKNTLYLQMNSLRAEDTAVYYCARAEYYYDSSGYFDYWGQG

SEQ ID NO: 7375 - DNA, 129 bp, Artificial Sequence
  Description of Artificial Sequence: Synthetic antibody
gacaattccaagaacacgctgtatcttcaaatgaacagcctgagagccgaggacacggccgtgtattactgtgcgagagcagaatattactatgatagtagtggttattttgactactggggccaggga

SEQ ID NO: 7376 - protein, 43 aa, Artificial Sequence
  Description of Artificial Sequence: Synthetic antibody
DNSKNTLYLQMNSLRAEDTAVYYCARAEYYYDSSGYFDYWGQG

SEQ ID NO: 7377 - protein, 15 aa, Artificial Sequence
  Description of Artificial Sequence: Synthetic antibody
CARDLGAAADLIDYW

SEQ ID NO: 7378 - DNA, 129 bp, Artificial Sequence
  Description of Artificial Sequence: Synthetic antibody
caaccagacacatccaagaaccagttctccctgcagctgaactctgtgactcccgaggacacggctgtgtattactgtgcaagagatttgggggcagcagctgatctcattgactactggggccaggga

SEQ ID NO: 7379 - protein, 43 aa, Artificial Sequence
  Description of Artificial Sequence: Synthetic antibody
QPDTSKNQFSLQLNSVTPEDTAVYYCARDLGAAADLIDYWGQG

SEQ ID NO: 7380 - DNA, 129 bp, Artificial Sequence
  Description of Artificial Sequence: Synthetic antibody
aacccagacacatccaagaaccagttctccctgcagctgaactctgtgactcccgaggacacggctgtgtattactgtgcaagagatttgggggcagcagctgatctcattgactactggggccaggga

SEQ ID NO: 7381 - protein, 43 aa, Artificial Sequence
  Description of Artificial Sequence: Synthetic antibody
NPDTSKNQFSLQLNSVTPEDTAVYYCARDLGAAADLIDYWGQG

SEQ ID NO: 7382 - protein, 22 aa, Artificial Sequence
  Description of Artificial Sequence: Synthetic antibody
CARDSFGIAVAGREYYYGMDVW

SEQ ID NO: 7383 - DNA, 129 bp, Artificial Sequence
  Description of Artificial Sequence: Synthetic antibody
tcagcctacatggagctgagcagcctgatatctgaggacacggccgtgtattactgtgcgagagacagcttcggtatagcagtggccggtagggagtactactacggtatggacgtctggggccaaggg

SEQ ID NO: 7384 - protein, 43 aa, Artificial Sequence
  Description of Artificial Sequence: Synthetic antibody
SAYMELSSLISEDTAVYYCARDSFGIAVAGREYYYGMDVWGQG

SEQ ID NO: 7385 - DNA, 129 bp, Artificial Sequence
  Description of Artificial Sequence: Synthetic antibody
acagcctacatggagctgagcagcctgagatctgaggacacggccgtgtattactgtgcgagagacagcttcggtatagcagtggccggtagggagtactactacggtatggacgtctggggccaaggg

SEQ ID NO: 7386 - protein, 43 aa, Artificial Sequence
  Description of Artificial Sequence: Synthetic antibody
TAYMELSSLRSEDTAVYYCARDSFGIAVAGREYYYGMDVWGQG

SEQ ID NO: 7387 - protein, 16 aa, Artificial Sequence
  Description of Artificial Sequence: Synthetic antibody
CAKGPSGYSSSWFDYW

SEQ ID NO: 7388 - DNA, 129 bp, Artificial Sequence
  Description of Artificial Sequence: Synthetic antibody
agagataattccaagaacacgctgtatctgcaaatgaacagcctgagagccgaggacacggccgtatattactgtgcgaaagggccttccgggtatagcagcagctggtttgactactggggccaggga

SEQ ID NO: 7389 - protein, 43 aa, Artificial Sequence
  Description of Artificial Sequence: Synthetic antibody
RDNSKNTLYLQMNSLRAEDTAVYYCAKGPSGYSSSWFDYWGQG

SEQ ID NO: 7390 - DNA, 129 bp, Artificial Sequence
  Description of Artificial Sequence: Synthetic antibody
agagataattccaagaacacgctgtatctgcaaatgaacagcctgagagccgaggacacggccgtatattactgtgcgaaagggccttccgggtacagcagcagctggttcgactactggggccaggga

SEQ ID NO: 7391 - protein, 14 aa, Artificial Sequence
  Description of Artificial Sequence: Synthetic antibody
CARQAPGGYGYGYW

SEQ ID NO: 7392 - DNA, 129 bp, Artificial Sequence
  Description of Artificial Sequence: Synthetic antibody
ctctccagagacaattccaagaacacgttgtatcttcaaatggacagcctgagagccgaggacacggccgtttattactgtgcgagacaggccccgggcggctatggttacgggtactggggccaggga

SEQ ID NO: 7393 - protein, 43 aa, Artificial Sequence
  Description of Artificial Sequence: Synthetic antibody
LSRDNSKNTLYLQMDSLRAEDTAVYYCARQAPGGYGYGYWGQG

SEQ ID NO: 7394 - DNA, 129 bp, Artificial Sequence
  Description of Artificial Sequence: Synthetic antibody
ctctccagagacaattccaagaacacgttgtatcttcaaatggacagcctgagagccgaggacacggccggttattactgtgcgagacaggccccgggcggctatggttacgggtactggggccaggga

SEQ ID NO: 7395 - protein, 43 aa, Artificial Sequence
  Description of Artificial Sequence: Synthetic antibody
LSRDNSKNTLYLQMDSLRAEDTAGYYCARQAPGGYGYGYWGQG

SEQ ID NO: 7396 - protein, 23 aa, Artificial Sequence
  Description of Artificial Sequence: Synthetic antibody
CAKDLGSSWPSRYYYYYYGMDVW

SEQ ID NO: 7397 - DNA, 129 bp, Artificial Sequence
  Description of Artificial Sequence: Synthetic antibody
ctgtatctgcaaatgaacagcctgagagccgaggacacggccgtatattactgtgcgaaagatctaggcagcagctggccctcccgatattactactactactacggtatggacgtctggggccaaggg

SEQ ID NO: 7398 - protein, 43 aa, Artificial Sequence
  Description of Artificial Sequence: Synthetic antibody
LYLQMNSLRAEDTAVYYCAKDLGSSWPSRYYYYYYGMDVWGQG

SEQ ID NO: 7399 - DNA, 129 bp, Artificial Sequence
  Description of Artificial Sequence: Synthetic antibody
ctgtatatgcaaatcaacagcctgagagccgaggacacggccgtatattactgtgcgaaagatctaggcagcagctggccctcccgatattactactactactacggtatggacgtctggggccaaggg

SEQ ID NO: 7400 - protein, 43 aa, Artificial Sequence
  Description of Artificial Sequence: Synthetic antibody
LYMQINSLRAEDTAVYYCAKDLGSSWPSRYYYYYYGMDVWGQG

SEQ ID NO: 7401 - protein, 17 aa, Artificial Sequence
  Description of Artificial Sequence: Synthetic antibody
CAHTASSGWRGEYFQHW

SEQ ID NO: 7402 - DNA, 129 bp, Artificial Sequence
  Description of Artificial Sequence: Synthetic antibody
gacacctccaaaaacctggtggtcattacaatgaccaacatggaccctgtggacacagccacatattactgtgcacacaccgccagcagtggctggcggggggaatacttccagcactggggccagggc

SEQ ID NO: 7403 - protein, 43 aa, Artificial Sequence
  Description of Artificial Sequence: Synthetic antibody
DTSKNLVVITMTNMDPVDTATYYCAHTASSGWRGEYFQHWGQG

SEQ ID NO: 7404 - DNA, 129 bp, Artificial Sequence
  Description of Artificial Sequence: Synthetic antibody
gacacctccaaaaaccaggtggtccttacaatgaccaacatggaccctgtggacacagccacatattactgtgcacacaccgccagcagtggctggcggggggaatacttccagcactggggccagggc

SEQ ID NO: 7405 - protein, 43 aa, Artificial Sequence
  Description of Artificial Sequence: Synthetic antibody
DTSKNQVVLTMTNMDPVDTATYYCAHTASSGWRGEYFQHWGQG

SEQ ID NO: 7406 - protein, 12 aa, Artificial Sequence
  Description of Artificial Sequence: Synthetic antibody
CARDQAGAFDIW

SEQ ID NO: 7407 - DNA, 129 bp, Artificial Sequence
  Description of Artificial Sequence: Synthetic antibody
ataaccatcaacccagacacatccaagaaccagttctccctgcagctgaactctgtgactcccgaggacacggctgtgtattactgtgcaagagaccaggctggtgcttttgatatctggggccaaggg

SEQ ID NO: 7408 - protein, 43 aa, Artificial Sequence
  Description of Artificial Sequence: Synthetic antibody
ITINPDTSKNQFSLQLNSVTPEDTAVYYCARDQAGAFDIWGQG

SEQ ID NO: 7409 - DNA, 129 bp, Artificial Sequence
  Description of Artificial Sequence: Synthetic antibody
ataaccatcaacccagacacatccaagaaccagttctccctgcagctgaactccgtgactcccgaggacacggctgtgtattactgtgcaagagaccaggctggtgcttttgatatctggggccaaggg

SEQ ID NO: 7410 - protein, 25 aa, Artificial Sequence
  Description of Artificial Sequence: Synthetic antibody
CASLNSSGTSRVFPVRYYYYGMDVW

SEQ ID NO: 7411 - DNA, 129 bp, Artificial Sequence
  Description of Artificial Sequence: Synthetic antibody
ttggagctgaggagcctgagatctgacgacacggccgtgtattactgtgcgagcctgaatagcagtggcacatcacgtgtatttcccgttcgctactactactacggtatggacgtctggggccaaggg

SEQ ID NO: 7412 - protein, 43 aa, Artificial Sequence
  Description of Artificial Sequence: Synthetic antibody
LELRSLRSDDTAVYYCASLNSSGTSRVFPVRYYYYGMDVWGQG

SEQ ID NO: 7413 - DNA, 129 bp, Artificial Sequence
  Description of Artificial Sequence: Synthetic antibody
atggagctgaggagcctgagatctgacgacacggccgtgtattactgtgcgagcctgaatagcagtggcacatcacgtgtatttcccgttcgctactactactacggtatggacgtctggggccaaggg

SEQ ID NO: 7414 - protein, 43 aa, Artificial Sequence
  Description of Artificial Sequence: Synthetic antibody
MELRSLRSDDTAVYYCASLNSSGTSRVFPVRYYYYGMDVWGQG

SEQ ID NO: 7415 - protein, 12 aa, Artificial Sequence
  Description of Artificial Sequence: Synthetic antibody
CAREGVGAFRDW

SEQ ID NO: 7416 - DNA, 129 bp, Artificial Sequence
  Description of Artificial Sequence: Synthetic antibody
ttcaccatctacagagacaattccaagaacacgttgtatcttcaaatgaacagcctgagagccgacgacacggccgtgtattactgtgcgagagaaggggtcggggccttcagggattggggccaggga

SEQ ID NO: 7417 - protein, 43 aa, Artificial Sequence
  Description of Artificial Sequence: Synthetic antibody
FTIYRDNSKNTLYLQMNSLRADDTAVYYCAREGVGAFRDWGQG

SEQ ID NO: 7418 - DNA, 129 bp, Artificial Sequence
  Description of Artificial Sequence: Synthetic antibody
ttcaccatctacagacacaattccaagaacacgttgtatcttcaaatcaacagcctgagagccgacgacacggccgtgtattactgtgcgagagaaggggtcggggccttcagggattggggccaggga

SEQ ID NO: 7419 - protein, 43 aa, Artificial Sequence
  Description of Artificial Sequence: Synthetic antibody
FTIYRHNSKNTLYLQINSLRADDTAVYYCAREGVGAFRDWGQG

SEQ ID NO: 7420 - protein, 16 aa, Artificial Sequence
  Description of Artificial Sequence: Synthetic antibody
CAKDLTIFGVVPFDYW

SEQ ID NO: 7421 - DNA, 129 bp, Artificial Sequence
  Description of Artificial Sequence: Synthetic antibody
agagacaattccaagaacacgctgtatctgcaaatgaacagcctgagggccgaggacacggccgtatattactgtgcgaaagatctaacgatttttggagtggtgccctttgactactggggccaggga

SEQ ID NO: 7422 - protein, 43 aa, Artificial Sequence
  Description of Artificial Sequence: Synthetic antibody
RDNSKNTLYLQMNSLRAEDTAVYYCAKDLTIFGVVPFDYWGQG

SEQ ID NO: 7423 - DNA, 129 bp, Artificial Sequence
  Description of Artificial Sequence: Synthetic antibody
agagacaattccaagaacacgctgtatctgcaaatgaacagcctgagagccgaggacacggccgtatattactgtgcgaaagatctaacgatttttggagtggtgccctttgactactggggccaggga

SEQ ID NO: 7424 - protein, 11 aa, Artificial Sequence
  Description of Artificial Sequence: Synthetic antibody
CAKGRGGLDVW

SEQ ID NO: 7425 - DNA, 129 bp, Artificial Sequence
  Description of Artificial Sequence: Synthetic antibody
cggttcaccatatccagatataattccaagaacacgctgtatctgcaaatgaacagcctgagagccgaggacacggccgtatattattgtgccaagggccggggcggtctggacgtctggggccaaggg

SEQ ID NO: 7426 - protein, 43 aa, Artificial Sequence
  Description of Artificial Sequence: Synthetic antibody
RFTISRYNSKNTLYLQMNSLRAEDTAVYYCAKGRGGLDVWGQG

SEQ ID NO: 7427 - DNA, 129 bp, Artificial Sequence
  Description of Artificial Sequence: Synthetic antibody
cggttcaccatatccagagataattccaagaacacgctgtatctgcaaatgaacagcctgagagccgaggacacggccgtatattattgtgccaagggccggggcggtctggacgtctggggccaaggg

SEQ ID NO: 7428 - protein, 43 aa, Artificial Sequence
  Description of Artificial Sequence: Synthetic antibody
RFTISRDNSKNTLYLQMNSLRAEDTAVYYCAKGRGGLDVWGQG

SEQ ID NO: 7429 - protein, 14 aa, Artificial Sequence
  Description of Artificial Sequence: Synthetic antibody
CTREMGGWREHDYW

SEQ ID NO: 7430 - DNA, 129 bp, Artificial Sequence
  Description of Artificial Sequence: Synthetic antibody
atctccagagacaattccaagaacacgctgtatcttcaaatgggcagcctgcgagctgaggacgtggctgtgtattactgtacgagggagatgggaggttggcgcgagcacgactactggggccaggga

SEQ ID NO: 7431 - protein, 43 aa, Artificial Sequence
  Description of Artificial Sequence: Synthetic antibody
ISRDNSKNTLYLQMGSLRAEDVAVYYCTREMGGWREHDYWGQG

SEQ ID NO: 7432 - DNA, 129 bp, Artificial Sequence
  Description of Artificial Sequence: Synthetic antibody
atctccagagacaattccaagaacacgctgtatcttcaaatgggcagcctgcgagctgaggacatggctgtgtattactgtacgagggagatgggaggttggcgcgagcacgactactggggccaggga

SEQ ID NO: 7433 - protein, 43 aa, Artificial Sequence
  Description of Artificial Sequence: Synthetic antibody
ISRDNSKNTLYLQMGSLRAEDMAVYYCTREMGGWREHDYWGQG

SEQ ID NO: 7434 - protein, 21 aa, Artificial Sequence
  Description of Artificial Sequence: Synthetic antibody
CARDFRGVAPYYYYYYGMDVW

SEQ ID NO: 7435 - DNA, 129 bp, Artificial Sequence
  Description of Artificial Sequence: Synthetic antibody
tgcacagcctacttggagctgaggagcctgagatctgacgacacggccgtgtattactgtgcgagagattttcggggagttgccccatattactactactactacggtatggacgtctggggccaaggg

SEQ ID NO: 7436 - protein, 43 aa, Artificial Sequence
  Description of Artificial Sequence: Synthetic antibody
CTAYLELRSLRSDDTAVYYCARDFRGVAPYYYYYYGMDVWGQG

SEQ ID NO: 7437 - DNA, 129 bp, Artificial Sequence
  Description of Artificial Sequence: Synthetic antibody
agcacagcctacatggagctgaggagcctgagatctgacgacacggccgtgtattactgtgcgagagattttcggggagttgccccatattactactactactacggtatggacgtctggggccaaggg

SEQ ID NO: 7438 - protein, 43 aa, Artificial Sequence
  Description of Artificial Sequence: Synthetic antibody
STAYMELRSLRSDDTAVYYCARDFRGVAPYYYYYYGMDVWGQG

SEQ ID NO: 7439 - protein, 18 aa, Artificial Sequence
  Description of Artificial Sequence: Synthetic antibody
CAHRTKGYGDYSYYFDYW

SEQ ID NO: 7440 - DNA, 129 bp, Artificial Sequence
  Description of Artificial Sequence: Synthetic antibody
acctccaaaaaccaggtggtccttacaatgaccaacatggaccctgtggacacagccacatattactgtgcacacaggaccaaggggtacggtgactactcctactactttgactactggggccaggga

SEQ ID NO: 7441 - protein, 43 aa, Artificial Sequence
  Description of Artificial Sequence: Synthetic antibody
TSKNQVVLTMTNMDPVDTATYYCAHRTKGYGDYSYYFDYWGQG

SEQ ID NO: 7442 - DNA, 129 bp, Artificial Sequence
  Description of Artificial Sequence: Synthetic antibody
cacctccaaaaccaggtggtccttacaatgaccaacatggaccctgtggacacagccacatattactgtgcacacaggaccaaggggtacggtgactactcctactactttgactactggggccaggga

SEQ ID NO: 7443 - protein, 43 aa, Artificial Sequence
  Description of Artificial Sequence: Synthetic antibody
HLQNQVVLTMTNMDPVDTATYYCAHRTKGYGDYSYYFDYWGQG

SEQ ID NO: 7444 - protein, 15 aa, Artificial Sequence
  Description of Artificial Sequence: Synthetic antibody
CAKDWLLVHNWFDPW

SEQ ID NO: 7445 - DNA, 129 bp, Artificial Sequence
  Description of Artificial Sequence: Synthetic antibody
tccagagacaattccaagaacacgctgtatctgcaaatgaacagcctgagagccgaggacacggccgtatattactgtgcgaaagattggctgctggttcacaactggttcgacccctggggccaggga

SEQ ID NO: 7446 - protein, 43 aa, Artificial Sequence
  Description of Artificial Sequence: Synthetic antibody
SRDNSKNTLYLQMNSLRAEDTAVYYCAKDWLLVHNWFDPWGQG

SEQ ID NO: 7447 - DNA, 129 bp, Artificial Sequence
  Description of Artificial Sequence: Synthetic antibody
tacagagacaattccaagaacacgctgtatctgaaaatgaacagcctgagagccgaggacacggccgtatattactgtgcgaaagattggctgctggttcacaactggttcgacccctggggccaggga

SEQ ID NO: 7448 - protein, 43 aa, Artificial Sequence
  Description of Artificial Sequence: Synthetic antibody
YRDNSKNTLYLKMNSLRAEDTAVYYCAKDWLLVHNWFDPWGQG

SEQ ID NO: 7449 - protein, 21 aa, Artificial Sequence
  Description of Artificial Sequence: Synthetic antibody
CTTDSAPNTFSGRWYGAFDIW

SEQ ID NO: 7450 - DNA, 129 bp, Artificial Sequence
  Description of Artificial Sequence: Synthetic antibody
aacacactatatctgcaaatgaacagcctgaaaaccgaagacacagccgtatattactgtaccacagacagcgcccctaacacttttagcggcaggtggtatggtgcttttgatatatggggccaaggg

SEQ ID NO: 7451 - protein, 43 aa, Artificial Sequence
  Description of Artificial Sequence: Synthetic antibody
NTLYLQMNSLKTEDTAVYYCTTDSAPNTFSGRWYGAFDIWGQG

SEQ ID NO: 7452 - DNA, 129 bp, Artificial Sequence
  Description of Artificial Sequence: Synthetic antibody
aaacacactatatctgcaaatgaacagcctgaaaccgaagacacagccgtatattactgtaccacagacagcgcccctaacacttttagcggcaggtggtatggtgcttttgatatatggggccaaggg

SEQ ID NO: 7453 - protein, 43 aa, Artificial Sequence
  Description of Artificial Sequence: Synthetic antibody
KHTISANEQPETEDTAVYYCTTDSAPNTFSGRWYGAFDIWGQG

SEQ ID NO: 7454 - protein, 15 aa, Artificial Sequence
  Description of Artificial Sequence: Synthetic antibody
CAREAGVSRRDLDYW

SEQ ID NO: 7455 - DNA, 129 bp, Artificial Sequence
  Description of Artificial Sequence: Synthetic antibody
tccagagacaacgccaagaacacgctgtatctgcaaatgaatagtctgagagccgaggacacggctgtgttttactgtgcaagagaggctggtgtgagcagaagagacttagactactggggccaggga

SEQ ID NO: 7456 - protein, 43 aa, Artificial Sequence
  Description of Artificial Sequence: Synthetic antibody
SRDNAKNTLYLQMNSLRAEDTAVFYCAREAGVSRRDLDYWGQG

SEQ ID NO: 7457 - DNA, 129 bp, Artificial Sequence
  Description of Artificial Sequence: Synthetic antibody
tccagagacaaccccaacaacacgctgtatctgcaaatgaatagtctgagagccgaggacacggctgtgttttactgtgcaagagaggctggtgtgagcagaagagacttagactactggggccaggga

SEQ ID NO: 7458 - protein, 43 aa, Artificial Sequence
  Description of Artificial Sequence: Synthetic antibody
SRDNPNNTLYLQMNSLRAEDTAVFYCAREAGVSRRDLDYWGQG

SEQ ID NO: 7459 - protein, 15 aa, Artificial Sequence
  Description of Artificial Sequence: Synthetic antibody
CARMGASYGSSLDPW

SEQ ID NO: 7460 - DNA, 129 bp, Artificial Sequence
  Description of Artificial Sequence: Synthetic antibody
ctccaaggacacctccaaaaccaggtggtccttacaatgaccaacatggaccctgtggacacagccacgtattactgtgcacggatgggggcctcttatggttcgtccctcgacccctggggccaggga

SEQ ID NO: 7461 - protein, 43 aa, Artificial Sequence
  Description of Artificial Sequence: Synthetic antibody
LQGHLQNQVVLTMTNMDPVDTATYYCARMGASYGSSLDPWGQG

SEQ ID NO: 7462 - DNA, 129 bp, Artificial Sequence
  Description of Artificial Sequence: Synthetic antibody
tccaaggacacctccaaaaaccaggtggtccttacaatgaccaacatggaccctgtggacacagccacgtattactgtgcacggatgggggcctcttatggttcgtccctcgacccctggggccaggga

SEQ ID NO: 7463 - protein, 43 aa, Artificial Sequence
  Description of Artificial Sequence: Synthetic antibody
SKDTSKNQVVLTMTNMDPVDTATYYCARMGASYGSSLDPWGQG

SEQ ID NO: 7464 - protein, 18 aa, Artificial Sequence
  Description of Artificial Sequence: Synthetic antibody
CAKDHYYSSGSSGYFQHW

SEQ ID NO: 7465 - DNA, 129 bp, Artificial Sequence
  Description of Artificial Sequence: Synthetic antibody
aacgccaagaattccctgtatttgcaaatgaacagtctgagagttgaggacactgccttgtattactgtgcaaaagaccattactattcttcagggagctctgggtacttccagcactggggccagggc

SEQ ID NO: 7466 - protein, 43 aa, Artificial Sequence
  Description of Artificial Sequence: Synthetic antibody
NAKNSLYLQMNSLRVEDTALYYCAKDHYYSSGSSGYFQHWGQG

SEQ ID NO: 7467 - DNA, 129 bp, Artificial Sequence
  Description of Artificial Sequence: Synthetic antibody
aacgccaagaattccctgtatctgcaaatgaacagtctgagagttgaggacactgccttgtattactgtgcaaaagaccattactattcttcagggagctctgggtacttccagcactggggccagggc

SEQ ID NO: 7468 - protein, 24 aa, Artificial Sequence
  Description of Artificial Sequence: Synthetic antibody
CALNYGSGSYQGDPGYYYHGMDVW

SEQ ID NO: 7469 - DNA, 129 bp, Artificial Sequence
  Description of Artificial Sequence: Synthetic antibody
tatctgcaaatgaacagcctgagagacgaagacacggctgtgtattactgtgcgttgaactatggttcggggagttatcagggtgacccagggtactactaccacggtatggacgtctggggccaaggg

SEQ ID NO: 7470 - protein, 43 aa, Artificial Sequence
  Description of Artificial Sequence: Synthetic antibody
YLQMNSLRDEDTAVYYCALNYGSGSYQGDPGYYYHGMDVWGQG

SEQ ID NO: 7471 - DNA, 129 bp, Artificial Sequence
  Description of Artificial Sequence: Synthetic antibody
tatctgaaaatcaacagcctgagagacgaagacacggctgtgtattactgtgcgttgaactatggttcggggagttatcagggtgacccagggtactactaccacggtatggacgtctggggccaaggg

SEQ ID NO: 7472 - protein, 43 aa, Artificial Sequence
  Description of Artificial Sequence: Synthetic antibody
YLKINSLRDEDTAVYYCALNYGSGSYQGDPGYYYHGMDVWGQG

SEQ ID NO: 7473 - protein, 18 aa, Artificial Sequence
  Description of Artificial Sequence: Synthetic antibody
CAHGLSSGWYRTNWFDPW

SEQ ID NO: 7474 - DNA, 129 bp, Artificial Sequence
  Description of Artificial Sequence: Synthetic antibody
acctccaaaaaccaggtggtccttacaatgaccaacatggaccctgtggacacagccacatattactgtgcacacggactaagcagtggctggtacaggaccaactggttcgacccctggggccaggga

SEQ ID NO: 7475 - protein, 43 aa, Artificial Sequence
  Description of Artificial Sequence: Synthetic antibody
TSKNQVVLTMTNMDPVDTATYYCAHGLSSGWYRTNWFDPWGQG

SEQ ID NO: 7476 - DNA, 129 bp, Artificial Sequence
  Description of Artificial Sequence: Synthetic antibody
cacctccaaaaccaggtggtccttacaatgaccaacatggaccctgtggacacagccacatattactgtgcacacggactaagcagtggctggtacaggaccaactggttcgacccctggggccaggga

SEQ ID NO: 7477 - protein, 43 aa, Artificial Sequence
  Description of Artificial Sequence: Synthetic antibody
HLQNQVVLTMTNMDPVDTATYYCAHGLSSGWYRTNWFDPWGQG

SEQ ID NO: 7478 - protein, 14 aa, Artificial Sequence
  Description of Artificial Sequence: Synthetic antibody
CARGEVGHDEFDIW

SEQ ID NO: 7479 - DNA, 129 bp, Artificial Sequence
  Description of Artificial Sequence: Synthetic antibody
attttagtagacacgtccaagaatcagctgtccctgacgatgaactctgtgagtgccgctgacacggccctttattactgtgcgagaggcgaagtggggcatgatgagttcgatatctggggccaaggg

SEQ ID NO: 7480 - protein, 43 aa, Artificial Sequence
  Description of Artificial Sequence: Synthetic antibody
ILVDTSKNQLSLTMNSVSAADTALYYCARGEVGHDEFDIWGQG

SEQ ID NO: 7481 - protein, 16 aa, Artificial Sequence
  Description of Artificial Sequence: Synthetic antibody
CTHNVGGWDGPYSDCW

SEQ ID NO: 7482 - DNA, 129 bp, Artificial Sequence
  Description of Artificial Sequence: Synthetic antibody
aaggacacttccgaaaaccgggtgatccttacaatgaccaacatggaccctgtggacacagccacatatttctgtacacacaatgttggaggctgggatgggccctactctgactgctggggccaggga

SEQ ID NO: 7483 - protein, 43 aa, Artificial Sequence
  Description of Artificial Sequence: Synthetic antibody
KDTSENRVILTMTNMDPVDTATYFCTHNVGGWDGPYSDCWGQG

SEQ ID NO: 7484 - DNA, 129 bp, Artificial Sequence
  Description of Artificial Sequence: Synthetic antibody
aaggacacctccaaaaaccgggtggtccttacaatgaccaacatggaccctgtggacacagccacatatttctgtacacacaatgttggaggctgggatgggccctactctgactgctggggccaggga

SEQ ID NO: 7485 - protein, 43 aa, Artificial Sequence
  Description of Artificial Sequence: Synthetic antibody
KDTSKNRVVLTMTNMDPVDTATYFCTHNVGGWDGPYSDCWGQG

SEQ ID NO: 7486 - protein, 19 aa, Artificial Sequence
  Description of Artificial Sequence: Synthetic antibody
CARDSMVRGVAEGDAFDIW

SEQ ID NO: 7487 - DNA, 129 bp, Artificial Sequence
  Description of Artificial Sequence: Synthetic antibody
gccaagaactcgctctttctgcaaatgaacagtctgagagccgaggacacggctgtgtattactgtgcaagagacagtatggttcggggagttgccgagggggatgcttttgatatctggggccaaggg

SEQ ID NO: 7488 - protein, 43 aa, Artificial Sequence
  Description of Artificial Sequence: Synthetic antibody
AKNSLFLQMNSLRAEDTAVYYCARDSMVRGVAEGDAFDIWGQG

SEQ ID NO: 7489 - DNA, 129 bp, Artificial Sequence
  Description of Artificial Sequence: Synthetic antibody
gccaagaacacgctctttctgcaaatgaacagtctgagagccgaggacacggctgtgtattactgtgcaagagacagtatggttcggggagttgccgagggggatgcttttgatatctggggccaaggg

SEQ ID NO: 7490 - protein, 43 aa, Artificial Sequence
  Description of Artificial Sequence: Synthetic antibody
AKNTLFLQMNSLRAEDTAVYYCARDSMVRGVAEGDAFDIWGQG

SEQ ID NO: 7491 - protein, 14 aa, Artificial Sequence
  Description of Artificial Sequence: Synthetic antibody
CARVHHLGRGFAYW

SEQ ID NO: 7492 - DNA, 129 bp, Artificial Sequence
  Description of Artificial Sequence: Synthetic antibody
atcttcccagacacatccaagaaccagttctccctgcagctgacctctgtgactcccgaggacacggctgtgtattactgtgcaagagtccatcacctcggccgggggtttgcctactggggccaggga

SEQ ID NO: 7493 - protein, 43 aa, Artificial Sequence
  Description of Artificial Sequence: Synthetic antibody
IFPDTSKNQFSLQLTSVTPEDTAVYYCARVHHLGRGFAYWGQG

SEQ ID NO: 7494 - DNA, 129 bp, Artificial Sequence
  Description of Artificial Sequence: Synthetic antibody
atcaacccagacacatccaagaaccagttctccctgcagctgacctctgtgactcccgaggacacggctgtgtattactgtgcaagagtccatcacctcggccgggggtttgcctactggggccaggga

SEQ ID NO: 7495 - protein, 43 aa, Artificial Sequence
  Description of Artificial Sequence: Synthetic antibody
INPDTSKNQFSLQLTSVTPEDTAVYYCARVHHLGRGFAYWGQG

SEQ ID NO: 7496 - protein, 14 aa, Artificial Sequence
  Description of Artificial Sequence: Synthetic antibody
CARADEDIAPPDYW

SEQ ID NO: 7497 - DNA, 129 bp, Artificial Sequence
  Description of Artificial Sequence: Synthetic antibody
atgaccacagacacattcacgagcacagcctacatggagctgaggagcctgagatctgacgacacggccgtctattattgtgcgagagctgatgaggatatagccccccccgactactggggccaggga

SEQ ID NO: 7498 - protein, 43 aa, Artificial Sequence
  Description of Artificial Sequence: Synthetic antibody
MTTDTFTSTAYMELRSLRSDDTAVYYCARADEDIAPPDYWGQG

SEQ ID NO: 7499 - DNA, 129 bp, Artificial Sequence
  Description of Artificial Sequence: Synthetic antibody
atgaccacacacacattcacgaccacagcctacatggagctgaggagcctgagatctgacgacacggccgtctattattgtgcgagagctgatgaggatatagccccccccgactactggggccaggga

SEQ ID NO: 7500 - protein, 43 aa, Artificial Sequence
  Description of Artificial Sequence: Synthetic antibody
MTTHTFTTTAYMELRSLRSDDTAVYYCARADEDIAPPDYWGQG

SEQ ID NO: 7501 - protein, 13 aa, Artificial Sequence
  Description of Artificial Sequence: Synthetic antibody
CARALEPTVGDVW

SEQ ID NO: 7502 - DNA, 129 bp, Artificial Sequence
  Description of Artificial Sequence: Synthetic antibody
acgattaccgcggacaaatccacgagcacagcctacatggagctgagcagcctgagatctgaggacacggccgtgtattactgtgcgagagctctagagccgaccgtgggggacgtctggggccaaggg

SEQ ID NO: 7503 - protein, 43 aa, Artificial Sequence
  Description of Artificial Sequence: Synthetic antibody
TITADKSTSTAYMELSSLRSEDTAVYYCARALEPTVGDVWGQG

SEQ ID NO: 7504 - DNA, 129 bp, Artificial Sequence
  Description of Artificial Sequence: Synthetic antibody
acgattaccgcgcacaaatccacgagcacagcctacatggagctgagcagcctgagatctgaggacacggccgtgtattactgtgcgagagctctagagccgaccgtgggggacgtctggggccaaggg

SEQ ID NO: 7505 - protein, 43 aa, Artificial Sequence
  Description of Artificial Sequence: Synthetic antibody
TITAHKSTSTAYMELSSLRSEDTAVYYCARALEPTVGDVWGQG

SEQ ID NO: 7506 - protein, 17 aa, Artificial Sequence
  Description of Artificial Sequence: Synthetic antibody
CAHRSLYYYGSGSWDYW

SEQ ID NO: 7507 - DNA, 129 bp, Artificial Sequence
  Description of Artificial Sequence: Synthetic antibody
gacacctccaaaaaccaggtggtccttacaatgaccaacatggaccctgtggacacagccacatattactgtgcacaccgatctctgtattactatggttcagggagttgggactactggggccaggga

SEQ ID NO: 7508 - protein, 43 aa, Artificial Sequence
  Description of Artificial Sequence: Synthetic antibody
DTSKNQVVLTMTNMDPVDTATYYCAHRSLYYYGSGSWDYWGQG

SEQ ID NO: 7509 - DNA, 129 bp, Artificial Sequence
  Description of Artificial Sequence: Synthetic antibody
ggacacctccaaaaccaggtggtccttacaatgaccaacatggaccctgtggacacagccacatattactgtgcacaccgatctctgtattactatggttcagggagttgggactactggggccaggga

SEQ ID NO: 7510 - protein, 43 aa, Artificial Sequence
  Description of Artificial Sequence: Synthetic antibody
GHLQNQVVLTMTNMDPVDTATYYCAHRSLYYYGSGSWDYWGQG

SEQ ID NO: 7511 - protein, 14 aa, Artificial Sequence
  Description of Artificial Sequence: Synthetic antibody
CARGDRQWLVRDYW

SEQ ID NO: 7512 - DNA, 129 bp, Artificial Sequence
  Description of Artificial Sequence: Synthetic antibody
atgaccaggaacacctccataagcacagcctacatggagctgagcagcctgagatctgaggacacggccgtgtattactgtgcgagaggggatcggcagtggctggtaagagactactggggccaggga

SEQ ID NO: 7513 - protein, 43 aa, Artificial Sequence
  Description of Artificial Sequence: Synthetic antibody
MTRNTSISTAYMELSSLRSEDTAVYYCARGDRQWLVRDYWGQG

SEQ ID NO: 7514 - DNA, 129 bp, Artificial Sequence
  Description of Artificial Sequence: Synthetic antibody
atgaccagcaacacctccataagcacagcctacatggagctgagcagcctgagatctgaggacacggccgtgtattactgtgcgagaggggatcggcagtggctggtaagagactactggggccaggga

SEQ ID NO: 7515 - protein, 43 aa, Artificial Sequence
  Description of Artificial Sequence: Synthetic antibody
MTSNTSISTAYMELSSLRSEDTAVYYCARGDRQWLVRDYWGQG

SEQ ID NO: 7516 - protein, 20 aa, Artificial Sequence
  Description of Artificial Sequence: Synthetic antibody
CAHSVPLLWFGELYGWFDPW

SEQ ID NO: 7517 - DNA, 129 bp, Artificial Sequence
  Description of Artificial Sequence: Synthetic antibody
caaaaaccaggtggtccttcaatgaccaacatggaccctgtggacacagccacatattactgtgcacacagcgtccctttactatggttcggggagttatatggttggttcgacccctggggccaggga

SEQ ID NO: 7518 - protein, 43 aa, Artificial Sequence
  Description of Artificial Sequence: Synthetic antibody
QKPGGPSMTNMDPVDTATYYCAHSVPLLWFGELYGWFDPWGQG

SEQ ID NO: 7519 - DNA, 129 bp, Artificial Sequence
  Description of Artificial Sequence: Synthetic antibody
aaaaaccaggtggtccttacaatgaccaacatggaccctgtggacacagccacatattactgtgcacacagcgtccctttactatggttcggggagttatatggttggttcgacccctggggccaggga

SEQ ID NO: 7520 - protein, 43 aa, Artificial Sequence
  Description of Artificial Sequence: Synthetic antibody
KNQVVLTMTNMDPVDTATYYCAHSVPLLWFGELYGWFDPWGQG

SEQ ID NO: 7521 - protein, 22 aa, Artificial Sequence
  Description of Artificial Sequence: Synthetic antibody
CARDSEVAAAGIYYYYYGMDVW

SEQ ID NO: 7522 - DNA, 129 bp, Artificial Sequence
  Description of Artificial Sequence: Synthetic antibody
acagcctacatggagctgaggagcctgagatctgacgacacggccgtgtattactgtgcgagagattctgaggtagcagcagctggtatttactactactactacggtatggacgtctggggccaaggg

SEQ ID NO: 7523 - protein, 43 aa, Artificial Sequence
  Description of Artificial Sequence: Synthetic antibody
TAYMELRSLRSDDTAVYYCARDSEVAAAGIYYYYYGMDVWGQG

SEQ ID NO: 7524 - DNA, 129 bp, Artificial Sequence
  Description of Artificial Sequence: Synthetic antibody
aatgcctacatggagctgaggagcctgagatctgacgacacggccgtgtattactgtgcgagagattctgaggtagcagcagctggtatttactactactactacggtatggacgtctggggccaaggg

SEQ ID NO: 7525 - protein, 43 aa, Artificial Sequence
  Description of Artificial Sequence: Synthetic antibody
NAYMELRSLRSDDTAVYYCARDSEVAAAGIYYYYYGMDVWGQG

SEQ ID NO: 7526 - protein, 13 aa, Artificial Sequence
  Description of Artificial Sequence: Synthetic antibody
CARERGPGYFDYW

SEQ ID NO: 7527 - DNA, 129 bp, Artificial Sequence
  Description of Artificial Sequence: Synthetic antibody
accatgaccacagacacatccacgagcacagcctacatggagctgaggagcctgagatctgacgacacggccgtgtattactgtgcgagagagaggggcccaggctactttgactactggggccaggga

SEQ ID NO: 7528 - protein, 43 aa, Artificial Sequence
  Description of Artificial Sequence: Synthetic antibody
TMTTDTSTSTAYMELRSLRSDDTAVYYCARERGPGYFDYWGQG

SEQ ID NO: 7529 - DNA, 129 bp, Artificial Sequence
  Description of Artificial Sequence: Synthetic antibody
accatgaccacacacacatccacgagcacagcctacatggagctgaggagcctgagatctgacgacacggccgtgtattactgtgcgagagagaggggcccaggctactttgactactggggccaggga

SEQ ID NO: 7530 - protein, 43 aa, Artificial Sequence
  Description of Artificial Sequence: Synthetic antibody
TMTTHTSTSTAYMELRSLRSDDTAVYYCARERGPGYFDYWGQG

SEQ ID NO: 7531 - protein, 15 aa, Artificial Sequence
  Description of Artificial Sequence: Synthetic antibody
CARHLRYYDWRLDYW

SEQ ID NO: 7532 - DNA, 129 bp, Artificial Sequence
  Description of Artificial Sequence: Synthetic antibody
tccgtagacacgtccaagaatcagttctccctgaacctgaggtctgtgaccgccgcagacacggctgtctattactgtgcgagacatctacgatattatgactggagacttgactactggggccaggga

SEQ ID NO: 7533 - protein, 43 aa, Artificial Sequence
  Description of Artificial Sequence: Synthetic antibody
SVDTSKNQFSLNLRSVTAADTAVYYCARHLRYYDWRLDYWGQG

SEQ ID NO: 7534 - DNA, 129 bp, Artificial Sequence
  Description of Artificial Sequence: Synthetic antibody
tccgtagacacgtccaagaatcagttctccctgaacctgaagtctgtgaccgccgcagacgcggctgtctattactgtgcgagacatctacgatattatgactggagacttgactactggggccaggga

SEQ ID NO: 7535 - protein, 43 aa, Artificial Sequence
  Description of Artificial Sequence: Synthetic antibody
SVDTSKNQFSLNLKSVTAADAAVYYCARHLRYYDWRLDYWGQG

SEQ ID NO: 7536 - protein, 12 aa, Artificial Sequence
  Description of Artificial Sequence: Synthetic antibody
CAKGDGEYFQHW

SEQ ID NO: 7537 - DNA, 129 bp, Artificial Sequence
  Description of Artificial Sequence: Synthetic antibody
ttcaccatctccagagacaattccaagaacacgctgtatctgcaaatgaacagcctgagagccgaggacacggccgtatattactgtgcgaaaggggacggtgaatacttccagcactggggccagggc

SEQ ID NO: 7538 - protein, 43 aa, Artificial Sequence
  Description of Artificial Sequence: Synthetic antibody
FTISRDNSKNTLYLQMNSLRAEDTAVYYCAKGDGEYFQHWGQG

SEQ ID NO: 7539 - DNA, 129 bp, Artificial Sequence
  Description of Artificial Sequence: Synthetic antibody
ttcaccatctccagacacaattccaagaacacgctgtatctgcaaatcaacagcctgagagccgaggacacggccgtatattactgtgcgaaaggggacggtgaatacttccagcactggggccagggc

SEQ ID NO: 7540 - protein, 43 aa, Artificial Sequence
  Description of Artificial Sequence: Synthetic antibody
FTISRHNSKNTLYLQINSLRAEDTAVYYCAKGDGEYFQHWGQG

SEQ ID NO: 7541 - protein, 16 aa, Artificial Sequence
  Description of Artificial Sequence: Synthetic antibody
CARESIAVGSRYFDYW

SEQ ID NO: 7542 - DNA, 129 bp, Artificial Sequence
  Description of Artificial Sequence: Synthetic antibody
agggacccgtccttcagcacagcctacatggaactgagcagtctgacatctgacgacactgtcgtctattactgtgcgagagagtcaatagcagttggttcgcgctactttgactactggggccagggg

SEQ ID NO: 7543 - protein, 43 aa, Artificial Sequence
  Description of Artificial Sequence: Synthetic antibody
RDPSFSTAYMELSSLTSDDTVVYYCARESIAVGSRYFDYWGQG

SEQ ID NO: 7544 - DNA, 129 bp, Artificial Sequence
  Description of Artificial Sequence: Synthetic antibody
agggacacgtccttcagcacagcctacatggagctgagcagtctggcatctgacgacactgtcgtatattactgtgcgcgagagtcaatagcagttggttcgcgctactttgactactggggccagggg

SEQ ID NO: 7545 - protein, 43 aa, Artificial Sequence
  Description of Artificial Sequence: Synthetic antibody
RDTSFSTAYMELSSLASDDTVVYYCARESIAVGSRYFDYWGQG

SEQ ID NO: 7546 - protein, 21 aa, Artificial Sequence
  Description of Artificial Sequence: Synthetic antibody
CARVQVQLERHGVGYYGMDVW

SEQ ID NO: 7547 - DNA, 129 bp, Artificial Sequence
  Description of Artificial Sequence: Synthetic antibody
agcacagcctacatggagctgaggagcctgagatctgacgacacggccgtgtattactgtgcgagagtccaggtacaactggaacggcatggggtagggtactacggtatggacgtctggggccagggg

SEQ ID NO: 7548 - protein, 43 aa, Artificial Sequence
  Description of Artificial Sequence: Synthetic antibody
STAYMELRSLRSDDTAVYYCARVQVQLERHGVGYYGMDVWGQG

SEQ ID NO: 7549 - DNA, 129 bp, Artificial Sequence
  Description of Artificial Sequence: Synthetic antibody
agcacagcctacatggagctgaggagcctgagatctgacgacacggccgtgtattactgtgcgagagtccaggtacaactggaacggcatggggtagggtactacggtatggacgtctggggccaaggg

SEQ ID NO: 7550 - protein, 18 aa, Artificial Sequence
  Description of Artificial Sequence: Synthetic antibody
CAHKIWFRELDHDAFDIW

SEQ ID NO: 7551 - DNA, 129 bp, Artificial Sequence
  Description of Artificial Sequence: Synthetic antibody
acctccaaaaaccaggtggtccttacaatgaccaacatggaccctgtggacacagccacatattactgtgcacacaagatatggttcagggagttagatcatgatgcttttgatatctggggccaaggg

SEQ ID NO: 7552 - protein, 43 aa, Artificial Sequence
  Description of Artificial Sequence: Synthetic antibody
TSKNQVVLTMTNMDPVDTATYYCAHKIWFRELDHDAFDIWGQG

SEQ ID NO: 7553 - DNA, 129 bp, Artificial Sequence
  Description of Artificial Sequence: Synthetic antibody
cacctccaaaaccaggtggtccttacaatgaccaacatggaccctgtggacacagccacatattactgtgcacacaagatatggttcagggagttagatcatgatgcttttgatatctggggccaaggg

SEQ ID NO: 7554 - protein, 43 aa, Artificial Sequence
  Description of Artificial Sequence: Synthetic antibody
HLQNQVVLTMTNMDPVDTATYYCAHKIWFRELDHDAFDIWGQG

SEQ ID NO: 7555 - protein, 16 aa, Artificial Sequence
  Description of Artificial Sequence: Synthetic antibody
CAKVSEYGSGSYFDYW

SEQ ID NO: 7556 - DNA, 129 bp, Artificial Sequence
  Description of Artificial Sequence: Synthetic antibody
agagacaacatcaaaaactccctgtatctgcaaatgaacagtctgagaactgaggacaccgccttgtattactgtgcaaaagtatcggagtatggttcggggagttattttgactactggggccaggga

SEQ ID NO: 7557 - protein, 43 aa, Artificial Sequence
  Description of Artificial Sequence: Synthetic antibody
RDNIKNSLYLQMNSLRTEDTALYYCAKVSEYGSGSYFDYWGQG

SEQ ID NO: 7558 - DNA, 129 bp, Artificial Sequence
  Description of Artificial Sequence: Synthetic antibody
agagacaacagcaaaaactccctgtatctgcaaatgaacagtctgagaactgaggacaccgccttgtattactgtgcaaaagtatcggagtatggttcggggagttattttgactactggggccaggga

SEQ ID NO: 7559 - protein, 43 aa, Artificial Sequence
  Description of Artificial Sequence: Synthetic antibody
RDNSKNSLYLQMNSLRTEDTALYYCAKVSEYGSGSYFDYWGQG

SEQ ID NO: 7560 - protein, 17 aa, Artificial Sequence
  Description of Artificial Sequence: Synthetic antibody
CTTDRSPRYYYYGMDVW

SEQ ID NO: 7561 - DNA, 129 bp, Artificial Sequence
  Description of Artificial Sequence: Synthetic antibody
gatgattcaaaaaacacgctgtatctgcaaatgaacagcctgaataccgaggacacagccgtgtattactgtaccacagatcggtcgccccgctactactactacggtatggacgtctggggccaaggg

SEQ ID NO: 7562 - protein, 43 aa, Artificial Sequence
  Description of Artificial Sequence: Synthetic antibody
DDSKNTLYLQMNSLNTEDTAVYYCTTDRSPRYYYYGMDVWGQG

SEQ ID NO: 7563 - DNA, 129 bp, Artificial Sequence
  Description of Artificial Sequence: Synthetic antibody
gatgattcaaaaaacacgctgtatctgcaaatgaacagcctgaaaaccgaggacacagccgtgtattactgtaccacagatcggtcgccccgctactactactacggtatggacgtctggggccaaggg

SEQ ID NO: 7564 - protein, 43 aa, Artificial Sequence
  Description of Artificial Sequence: Synthetic antibody
DDSKNTLYLQMNSLKTEDTAVYYCTTDRSPRYYYYGMDVWGQG

SEQ ID NO: 7565 - protein, 16 aa, Artificial Sequence
  Description of Artificial Sequence: Synthetic antibody
CAREWMTGPYNWFDPW

SEQ ID NO: 7566 - DNA, 129 bp, Artificial Sequence
  Description of Artificial Sequence: Synthetic antibody
agggacacatccgcgagcacagcctacatggagctgagcagcctgagctctgatgacacggctgtgtatttctgtgcgagggagtggatgactggaccgtacaactggttcgacccctggggccaggga

SEQ ID NO: 7567 - protein, 43 aa, Artificial Sequence
  Description of Artificial Sequence: Synthetic antibody
RDTSASTAYMELSSLSSDDTAVYFCAREWMTGPYNWFDPWGQG

SEQ ID NO: 7568 - DNA, 129 bp, Artificial Sequence
  Description of Artificial Sequence: Synthetic antibody
agggacacatccgcgagcacagcctacatggagctgagcagcctgagctctgacgacacggctgtgtatttctgtgcgagggagtggatgactggaccgtacaactggttcgacccctggggccaggga

SEQ ID NO: 7569 - protein, 22 aa, Artificial Sequence
  Description of Artificial Sequence: Synthetic antibody
CARYGYYDSSGPFWGTSWFDPW

SEQ ID NO: 7570 - DNA, 129 bp, Artificial Sequence
  Description of Artificial Sequence: Synthetic antibody
cagttctccctgaagttgagctctgtgaccgccgcagacacggccgtgtattactgtgcgagatatggttactatgatagtagtggaccattttggggaacttcctggttcgacccctggggccaggga

SEQ ID NO: 7571 - protein, 43 aa, Artificial Sequence
  Description of Artificial Sequence: Synthetic antibody
QFSLKLSSVTAADTAVYYCARYGYYDSSGPFWGTSWFDPWGQG

SEQ ID NO: 7572 - DNA, 129 bp, Artificial Sequence
  Description of Artificial Sequence: Synthetic antibody
cagttctccctgaagttgagccctgtgaccgccgcagacacggccgtgtactactgtgcgagatatggttactatgatagtagtggaccattttggggaacttcctggttcgacccctggggccaggga

SEQ ID NO: 7573 - protein, 43 aa, Artificial Sequence
  Description of Artificial Sequence: Synthetic antibody
QFSLKLSPVTAADTAVYYCARYGYYDSSGPFWGTSWFDPWGQG

SEQ ID NO: 7574 - protein, 14 aa, Artificial Sequence
  Description of Artificial Sequence: Synthetic antibody
CARIGYGDCLSDYW

SEQ ID NO: 7575 - DNA, 129 bp, Artificial Sequence
  Description of Artificial Sequence: Synthetic antibody
catctccaaggacacctccaaaaccaggtggtccttacaatgaccaacatggaccctgtggacacagccacgtattactgtgcacggataggctacggtgactgcctatctgactactggggccaggga

SEQ ID NO: 7576 - protein, 43 aa, Artificial Sequence
  Description of Artificial Sequence: Synthetic antibody
HLQGHLQNQVVLTMTNMDPVDTATYYCARIGYGDCLSDYWGQG

SEQ ID NO: 7577 - DNA, 129 bp, Artificial Sequence
  Description of Artificial Sequence: Synthetic antibody
atctccaaggacacctccaaaaaccaggtggtccttacaatgaccaacatggaccctgtggacacagccacgtattactgtgcacggataggctacggtgactgcctatctgactactggggccaggga

SEQ ID NO: 7578 - protein, 43 aa, Artificial Sequence
  Description of Artificial Sequence: Synthetic antibody
ISKDTSKNQVVLTMTNMDPVDTATYYCARIGYGDCLSDYWGQG

SEQ ID NO: 7579 - protein, 16 aa, Artificial Sequence
  Description of Artificial Sequence: Synthetic antibody
CARDPYGDLLLGLDYW

SEQ ID NO: 7580 - DNA, 129 bp, Artificial Sequence
  Description of Artificial Sequence: Synthetic antibody
tgggacacatccgcgagcacagcctacatggagctgagcagcctgagatctgaagacacggctgtgtattactgtgcgagagatccctacggtgacttactacttggtctggactactggggccaggga

SEQ ID NO: 7581 - protein, 43 aa, Artificial Sequence
  Description of Artificial Sequence: Synthetic antibody
WDTSASTAYMELSSLRSEDTAVYYCARDPYGDLLLGLDYWGQG

SEQ ID NO: 7582 - DNA, 129 bp, Artificial Sequence
  Description of Artificial Sequence: Synthetic antibody
agggacacatccgcgagcacagcctacatggagctgagcagcctgagatctgaagacacggctgtgtattactgtgcgagagatccctacggtgacttactacttggtctggactactggggccaggga

SEQ ID NO: 7583 - protein, 43 aa, Artificial Sequence
  Description of Artificial Sequence: Synthetic antibody
RDTSASTAYMELSSLRSEDTAVYYCARDPYGDLLLGLDYWGQG

SEQ ID NO: 7584 - protein, 19 aa, Artificial Sequence
  Description of Artificial Sequence: Synthetic antibody
CAIEGYCSSTSCSGAFDIW

SEQ ID NO: 7585 - DNA, 129 bp, Artificial Sequence
  Description of Artificial Sequence: Synthetic antibody
tccaagaactcgctgtatctgcaaatgaacagcctgagagccgaggacacggccgtatattactgtgccattgaaggatattgtagtagtaccagctgctccggagcttttgatatctggggccaaggg

SEQ ID NO: 7586 - protein, 43 aa, Artificial Sequence
  Description of Artificial Sequence: Synthetic antibody
SKNSLYLQMNSLRAEDTAVYYCAIEGYCSSTSCSGAFDIWGQG

SEQ ID NO: 7587 - DNA, 129 bp, Artificial Sequence
  Description of Artificial Sequence: Synthetic antibody
tccaagaacacgctgtatctgcaaatgaacagcctgagagccgaggacacggccgtatattactgtgccattgaaggatattgtagtagtaccagctgctccggagcttttgatatctggggccaaggg

SEQ ID NO: 7588 - protein, 43 aa, Artificial Sequence
  Description of Artificial Sequence: Synthetic antibody
SKNTLYLQMNSLRAEDTAVYYCAIEGYCSSTSCSGAFDIWGQG

SEQ ID NO: 7589 - protein, 16 aa, Artificial Sequence
  Description of Artificial Sequence: Synthetic antibody
CARISWYNSTWSLDYW

SEQ ID NO: 7590 - DNA, 129 bp, Artificial Sequence
  Description of Artificial Sequence: Synthetic antibody
agggacaacgccaagaactcgctgtatttgcaaatgaacagcctgagagccgaggacacggccgtctattactgtgcgagaataagctggtataacagcacttggtcccttgactactggggccaggga

SEQ ID NO: 7591 - protein, 43 aa, Artificial Sequence
  Description of Artificial Sequence: Synthetic antibody
RDNAKNSLYLQMNSLRAEDTAVYYCARISWYNSTWSLDYWGQG

SEQ ID NO: 7592 - DNA, 129 bp, Artificial Sequence
  Description of Artificial Sequence: Synthetic antibody
agggacaacgccaagaacccgctgtatttgcaaatgaacagcctgagagccgaggacacggccgtctattactgtgcgagaataagctggtataacagcacttggtcccttgactactggggccaggga

SEQ ID NO: 7593 - protein, 43 aa, Artificial Sequence
  Description of Artificial Sequence: Synthetic antibody
RDNAKNPLYLQMNSLRAEDTAVYYCARISWYNSTWSLDYWGQG

SEQ ID NO: 7594 - protein, 16 aa, Artificial Sequence
  Description of Artificial Sequence: Synthetic antibody
CAGADKPYYYYGMDVW

SEQ ID NO: 7595 - DNA, 129 bp, Artificial Sequence
  Description of Artificial Sequence: Synthetic antibody
tgggacatgcccacaagcacagcctacatggagctgagcagcctgagatccgaggacacggccgtgtattactgtgcgggagcggataagccttactactactacggtatggacgtctggggccaaggg

SEQ ID NO: 7596 - protein, 43 aa, Artificial Sequence
  Description of Artificial Sequence: Synthetic antibody
WDMPTSTAYMELSSLRSEDTAVYYCAGADKPYYYYGMDVWGQG

SEQ ID NO: 7597 - DNA, 129 bp, Artificial Sequence
  Description of Artificial Sequence: Synthetic antibody
agggacatgtccacaagcacagcctacatggagctgagcagcctgagatccgaggacacggccgtgtattactgtgcgggagcggataagccttactactactacggtatggacgtctggggccaaggg

SEQ ID NO: 7598 - protein, 43 aa, Artificial Sequence
  Description of Artificial Sequence: Synthetic antibody
RDMSTSTAYMELSSLRSEDTAVYYCAGADKPYYYYGMDVWGQG

SEQ ID NO: 7599 - protein, 12 aa, Artificial Sequence
  Description of Artificial Sequence: Synthetic antibody
CAKDQMGATDYW

SEQ ID NO: 7600 - DNA, 129 bp, Artificial Sequence
  Description of Artificial Sequence: Synthetic antibody
ttcaccatctccagatataattccaagaacacgctgtatctgcaaatgaacagcctgagagccgaggacacggccgtatattactgtgcgaaagatcaaatgggagctactgactactggggccaggga

SEQ ID NO: 7601 - protein, 43 aa, Artificial Sequence
  Description of Artificial Sequence: Synthetic antibody
FTISRYNSKNTLYLQMNSLRAEDTAVYYCAKDQMGATDYWGQG

SEQ ID NO: 7602 - DNA, 129 bp, Artificial Sequence
  Description of Artificial Sequence: Synthetic antibody
ttcaccatctccagagataattccaagaacacgctgtatctgcaaatgaacagcctgagagccgaggacacggccgtatattactgtgcgaaagatcaaatgggagctactgactactggggccaggga

SEQ ID NO: 7603 - protein, 43 aa, Artificial Sequence
  Description of Artificial Sequence: Synthetic antibody
FTISRDNSKNTLYLQMNSLRAEDTAVYYCAKDQMGATDYWGQG

SEQ ID NO: 7604 - protein, 21 aa, Artificial Sequence
  Description of Artificial Sequence: Synthetic antibody
CARVASSSWYSPKIDVVYDYW

SEQ ID NO: 7605 - DNA, 129 bp, Artificial Sequence
  Description of Artificial Sequence: Synthetic antibody
tgcacagtctacttggagctgagcagcctgagatctgaggacacggccgtgtattactgtgcgagagtggccagcagcagctggtactccccgaagattgatgtggtatatgactactggggccaggga

SEQ ID NO: 7606 - protein, 43 aa, Artificial Sequence
  Description of Artificial Sequence: Synthetic antibody
CTVYLELSSLRSEDTAVYYCARVASSSWYSPKIDVVYDYWGQG

SEQ ID NO: 7607 - DNA, 129 bp, Artificial Sequence
  Description of Artificial Sequence: Synthetic antibody
agcacagtctacatggagctgagcagcctgagatctgaggacacggccgtgtattactgtgcgagagtggccagcagcagctggtactccccgaagattgatgtggtatatgactactggggccaggga

SEQ ID NO: 7608 - protein, 43 aa, Artificial Sequence
  Description of Artificial Sequence: Synthetic antibody
STVYMELSSLRSEDTAVYYCARVASSSWYSPKIDVVYDYWGQG

SEQ ID NO: 7609 - protein, 12 aa, Artificial Sequence
  Description of Artificial Sequence: Synthetic antibody
CAKVGGWGMDVW

SEQ ID NO: 7610 - DNA, 129 bp, Artificial Sequence
  Description of Artificial Sequence: Synthetic antibody
ttcaccatctccagagacaattccaagaacacgctgtatctgcaaatgaacagcctgagagccgaggacacggccgtatattactgtgcgaaagtcgggggatggggtatggacgtctggggccaaggg

SEQ ID NO: 7611 - protein, 43 aa, Artificial Sequence
  Description of Artificial Sequence: Synthetic antibody
FTISRDNSKNTLYLQMNSLRAEDTAVYYCAKVGGWGMDVWGQG

SEQ ID NO: 7612 - DNA, 129 bp, Artificial Sequence
  Description of Artificial Sequence: Synthetic antibody
ttcaccatctccagacacaattccaagaacacgctgtatctgcaaatgaacagcctgagagccgaggacacggccgtatattactgtgcgaaagtcgggggatggggtatggacgtctggggccaaggg

SEQ ID NO: 7613 - protein, 43 aa, Artificial Sequence
  Description of Artificial Sequence: Synthetic antibody
FTISRHNSKNTLYLQMNSLRAEDTAVYYCAKVGGWGMDVWGQG

SEQ ID NO: 7614 - protein, 31 aa, Artificial Sequence
  Description of Artificial Sequence: Synthetic antibody
CARHGWNDPFPVTGYSSSWYPLDYYYGMDVW

SEQ ID NO: 7615 - DNA, 129 bp, Artificial Sequence
  Description of Artificial Sequence: Synthetic antibody
accgccgcagacacggctgtgtattactgtgcgagacatgggtggaatgacccgtttccggtcaccgggtatagcagcagctggtaccccctcgactactactacggtatggacgtctggggccaaggg

SEQ ID NO: 7616 - protein, 43 aa, Artificial Sequence
  Description of Artificial Sequence: Synthetic antibody
TAADTAVYYCARHGWNDPFPVTGYSSSWYPLDYYYGMDVWGQG

SEQ ID NO: 7617 - DNA, 129 bp, Artificial Sequence
  Description of Artificial Sequence: Synthetic antibody
ccgccgcagaccacggctgtgtattactgtgcgagacatgggtggaatgacccgtttccggtcaccgggtatagcagcagctggtaccccctcgactactactacggtatggacgtctggggccaaggg

SEQ ID NO: 7618 - protein, 43 aa, Artificial Sequence
  Description of Artificial Sequence: Synthetic antibody
PPQTTAVYYCARHGWNDPFPVTGYSSSWYPLDYYYGMDVWGQG

SEQ ID NO: 7619 - protein, 14 aa, Artificial Sequence
  Description of Artificial Sequence: Synthetic antibody
CARRASRRGAFDIW

SEQ ID NO: 7620 - DNA, 129 bp, Artificial Sequence
  Description of Artificial Sequence: Synthetic antibody
atgaccacagacacatccacgagtacagcctacatggagctgaggagcctgagatctgacgacacggccgtgtattactgtgcgagacgggcctctaggaggggagcttttgatatctggggccaaggg

SEQ ID NO: 7621 - protein, 43 aa, Artificial Sequence
  Description of Artificial Sequence: Synthetic antibody
MTTDTSTSTAYMELRSLRSDDTAVYYCARRASRRGAFDIWGQG

SEQ ID NO: 7622 - DNA, 129 bp, Artificial Sequence
  Description of Artificial Sequence: Synthetic antibody
atgaccacagacacatccacgagcacagcctacatggagctgaggagcctgagatctgacgacacggccgtgtattactgtgcgagacgggcctctaggaggggagcttttgatatctggggccaaggg

SEQ ID NO: 7623 - protein, 15 aa, Artificial Sequence
  Description of Artificial Sequence: Synthetic antibody
CARESKTTVTTLGYW

SEQ ID NO: 7624 - DNA, 129 bp, Artificial Sequence
  Description of Artificial Sequence: Synthetic antibody
accacagacacatccacgagcacagcctacatggagctgaggagcctgagatctgacgacacggccgtgtattactgtgcgagagaaagcaaaactacggtgactacgttaggctactggggccaggga

SEQ ID NO: 7625 - protein, 43 aa, Artificial Sequence
  Description of Artificial Sequence: Synthetic antibody
TTDTSTSTAYMELRSLRSDDTAVYYCARESKTTVTTLGYWGQG

SEQ ID NO: 7626 - DNA, 129 bp, Artificial Sequence
  Description of Artificial Sequence: Synthetic antibody
accacagacacatccacgagcacagcctacatggagctgaggagcctgagatctgacgacacggccgtgcattactgtgcgagagaaagcaaaactacggtgactacgttaggctactggggccaggga

SEQ ID NO: 7627 - protein, 43 aa, Artificial Sequence
  Description of Artificial Sequence: Synthetic antibody
TTDTSTSTAYMELRSLRSDDTAVHYCARESKTTVTTLGYWGQG

SEQ ID NO: 7628 - protein, 21 aa, Artificial Sequence
  Description of Artificial Sequence: Synthetic antibody
CAREGREAAAGTNYYYGMDVW

SEQ ID NO: 7629 - DNA, 129 bp, Artificial Sequence
  Description of Artificial Sequence: Synthetic antibody
tgcacagcctacttggagctgaggagcctgagatctgacgacacggccgtgtattactgtgcgagagagggcagggaagcagcagctggtacgaactactactacggtatggacgtctggggccaaggg

SEQ ID NO: 7630 - protein, 43 aa, Artificial Sequence
  Description of Artificial Sequence: Synthetic antibody
CTAYLELRSLRSDDTAVYYCAREGREAAAGTNYYYGMDVWGQG

SEQ ID NO: 7631 - DNA, 129 bp, Artificial Sequence
  Description of Artificial Sequence: Synthetic antibody
agcacagcctacatggagctgaggagcctgagatctgacgacacggccgtgtattactgtgcgagagagggcagggaagcagcagctggtacgaactactactacggtatggacgtctggggccaaggg

SEQ ID NO: 7632 - protein, 43 aa, Artificial Sequence
  Description of Artificial Sequence: Synthetic antibody
STAYMELRSLRSDDTAVYYCAREGREAAAGTNYYYGMDVWGQG

SEQ ID NO: 7633 - protein, 18 aa, Artificial Sequence
  Description of Artificial Sequence: Synthetic antibody
CARGPEWFANYYYGMDVW

SEQ ID NO: 7634 - DNA, 129 bp, Artificial Sequence
  Description of Artificial Sequence: Synthetic antibody
acgtccaagaaccagttctccctgaggctgagctctgtgaccgccgcggacacggccgtgtattactgtgcgagaggtccggagtggtttgccaactactactacggtatggacgtctggggccaaggg

SEQ ID NO: 7635 - protein, 43 aa, Artificial Sequence
  Description of Artificial Sequence: Synthetic antibody
TSKNQFSLRLSSVTAADTAVYYCARGPEWFANYYYGMDVWGQG

SEQ ID NO: 7636 - DNA, 129 bp, Artificial Sequence
  Description of Artificial Sequence: Synthetic antibody
acgtccaagaaccagttctccctgaagctgagctctgtgaccgccgcggacacggccgtgtattactgtgcgagaggtccggagtggtttgccaactactactacggtatggacgtctggggccaaggg

SEQ ID NO: 7637 - protein, 43 aa, Artificial Sequence
  Description of Artificial Sequence: Synthetic antibody
TSKNQFSLKLSSVTAADTAVYYCARGPEWFANYYYGMDVWGQG

SEQ ID NO: 7638 - protein, 17 aa, Artificial Sequence
  Description of Artificial Sequence: Synthetic antibody
CAKGQGDATTVTPFDYW

SEQ ID NO: 7639 - DNA, 129 bp, Artificial Sequence
  Description of Artificial Sequence: Synthetic antibody
gacaattccaagaacacgctgtatctgcaaatgaatagcctgagagccgaggacacggccatatattactgtgcgaaagggcaaggggatgcgactacggtgaccccctttgactactggggccaggga

SEQ ID NO: 7640 - protein, 43 aa, Artificial Sequence
  Description of Artificial Sequence: Synthetic antibody
DNSKNTLYLQMNSLRAEDTAIYYCAKGQGDATTVTPFDYWGQG

SEQ ID NO: 7641 - DNA, 129 bp, Artificial Sequence
  Description of Artificial Sequence: Synthetic antibody
gacaattccaagaacacgctgtatctgcaaatgaacagcctgagagccgaggacacggccatatattactgtgcgaaagggcaaggggatgcgactacggtgaccccctttgactactggggccaggga

SEQ ID NO: 7642 - protein, 16 aa, Artificial Sequence
  Description of Artificial Sequence: Synthetic antibody
CARQPQYYYGAGFDPW

SEQ ID NO: 7643 - DNA, 129 bp, Artificial Sequence
  Description of Artificial Sequence: Synthetic antibody
gccgacaagtccatcagcaccgcctacctgcagtggagcagcctgaaggcctcggacaccgccatttactattgtgcgagacagccccaatattactatggtgcggggttcgacccctggggccaggga

SEQ ID NO: 7644 - protein, 43 aa, Artificial Sequence
  Description of Artificial Sequence: Synthetic antibody
ADKSISTAYLQWSSLKASDTAIYYCARQPQYYYGAGFDPWGQG

SEQ ID NO: 7645 - DNA, 129 bp, Artificial Sequence
  Description of Artificial Sequence: Synthetic antibody
gacgacaagtccatcagcaccgcctacctgcagtggagcagcctgaaggcctctgacaccgccatttactattgtgcgagacagccccaatattactatggtgcggggttcgacccctggggccaggga

SEQ ID NO: 7646 - protein, 43 aa, Artificial Sequence
  Description of Artificial Sequence: Synthetic antibody
DDKSISTAYLQWSSLKASDTAIYYCARQPQYYYGAGFDPWGQG

SEQ ID NO: 7647 - protein, 15 aa, Artificial Sequence
  Description of Artificial Sequence: Synthetic antibody
CAHLQSGYDSILDYW

SEQ ID NO: 7648 - DNA, 129 bp, Artificial Sequence
  Description of Artificial Sequence: Synthetic antibody
caccaaggacacctccaaaaccaggtggtccttacaatgaccaacatggaccctgtggacacagccacatattactgtgcacaccttcaaagtggctacgattcaattttggactactggggccaggga

SEQ ID NO: 7649 - protein, 43 aa, Artificial Sequence
  Description of Artificial Sequence: Synthetic antibody
HQGHLQNQVVLTMTNMDPVDTATYYCAHLQSGYDSILDYWGQG

SEQ ID NO: 7650 - DNA, 129 bp, Artificial Sequence
  Description of Artificial Sequence: Synthetic antibody
accaaggacacctccaaaaaccaggtggtccttacaatgaccaacatggaccctgtggacacagccacatattactgtgcacaccttcaaagtggctacgattcaattttggactactggggccaggga

SEQ ID NO: 7651 - protein, 43 aa, Artificial Sequence
  Description of Artificial Sequence: Synthetic antibody
TKDTSKNQVVLTMTNMDPVDTATYYCAHLQSGYDSILDYWGQG

SEQ ID NO: 7652 - protein, 19 aa, Artificial Sequence
  Description of Artificial Sequence: Synthetic antibody
CAADGFGIVGATNNYFDYW

SEQ ID NO: 7653 - DNA, 129 bp, Artificial Sequence
  Description of Artificial Sequence: Synthetic antibody
tccacaagcacagcctacatggagctgagcagcctgagatccgaggacacggccgtgtattactgtgcggcagacgggttcggtatagtgggagctactaacaactactttgactactggggccaggga

SEQ ID NO: 7654 - protein, 43 aa, Artificial Sequence
  Description of Artificial Sequence: Synthetic antibody
STSTAYMELSSLRSEDTAVYYCAADGFGIVGATNNYFDYWGQG

SEQ ID NO: 7655 - DNA, 129 bp, Artificial Sequence
  Description of Artificial Sequence: Synthetic antibody
tccacaagcacagcctacatggagctgagcagcctgagatccgaggacacggccgtatattactgtgcggcagacgggttcggtatagtgggagctactaacaactactttgactactggggccaggga

SEQ ID NO: 7656 - protein, 22 aa, Artificial Sequence
  Description of Artificial Sequence: Synthetic antibody
CARGYCSGGSCYFSPGLGGVDW

SEQ ID NO: 7657 - DNA, 129 bp, Artificial Sequence
  Description of Artificial Sequence: Synthetic antibody
cagttctccctgaagctgagctctgtgactgccgcggacacggccgtgtattactgtgcgagaggatattgtagtggtggtagctgctatttttcgccgggtctcgggggtgtggactggggccaggga

SEQ ID NO: 7658 - protein, 43 aa, Artificial Sequence
  Description of Artificial Sequence: Synthetic antibody
QFSLKLSSVTAADTAVYYCARGYCSGGSCYFSPGLGGVDWGQG

SEQ ID NO: 7659 - DNA, 129 bp, Artificial Sequence
  Description of Artificial Sequence: Synthetic antibody
cagttctccctgaagctgagctctgtgactgccgcggacacggccgtgtattactgtgcgagaggatattgtagtggtggtagctgctatttttcgccgggtctcgggggtgtagactggggccaggga

SEQ ID NO: 7660 - protein, 20 aa, Artificial Sequence
  Description of Artificial Sequence: Synthetic antibody
CARGLLRDILTGYLPPLGYW

SEQ ID NO: 7661 - DNA, 129 bp, Artificial Sequence
  Description of Artificial Sequence: Synthetic antibody
aagaactcactgtatctgcaaatgaacagcctgagagacgaggacacggctgtgtattactgtgcgagagggcttctacgggatattttgactggttatctcccccctttggggtactggggccgggga

SEQ ID NO: 7662 - protein, 43 aa, Artificial Sequence
  Description of Artificial Sequence: Synthetic antibody
KNSLYLQMNSLRDEDTAVYYCARGLLRDILTGYLPPLGYWGRG

SEQ ID NO: 7663 - DNA, 129 bp, Artificial Sequence
  Description of Artificial Sequence: Synthetic antibody
aagaactcactgtatctgcaaatgaacagcctgagagacgaggacacggctgtgtattactgtgcgagaggacttctacgggatattttgactggttatctcccccctttggggtactggggccaggga

SEQ ID NO: 7664 - protein, 43 aa, Artificial Sequence
  Description of Artificial Sequence: Synthetic antibody
KNSLYLQMNSLRDEDTAVYYCARGLLRDILTGYLPPLGYWGQG

SEQ ID NO: 7665 - protein, 17 aa, Artificial Sequence
  Description of Artificial Sequence: Synthetic antibody
CTRPAENYYGSGSYGYW

SEQ ID NO: 7666 - DNA, 129 bp, Artificial Sequence
  Description of Artificial Sequence: Synthetic antibody
gatgattcaatcaacacggcgtatctgcaaatgaacagcctgaaaaccgaggacacggccgtgtattactgtactagacccgcggaaaattactatggttcggggagttatggctactggggccaggga

SEQ ID NO: 7667 - protein, 43 aa, Artificial Sequence
  Description of Artificial Sequence: Synthetic antibody
DDSINTAYLQMNSLKTEDTAVYYCTRPAENYYGSGSYGYWGQG

SEQ ID NO: 7668 - DNA, 129 bp, Artificial Sequence
  Description of Artificial Sequence: Synthetic antibody
gatgattcaaagaacacggcgtatctgcaaatgaacagcctgaaaaccgaggacacggccgtgtattactgtactagacccgcggaaaattactatggttcggggagttatggctactggggccaggga

SEQ ID NO: 7669 - protein, 43 aa, Artificial Sequence
  Description of Artificial Sequence: Synthetic antibody
DDSKNTAYLQMNSLKTEDTAVYYCTRPAENYYGSGSYGYWGQG

SEQ ID NO: 7670 - protein, 13 aa, Artificial Sequence
  Description of Artificial Sequence: Synthetic antibody
CAHGSGWTTFDYW

SEQ ID NO: 7671 - DNA, 129 bp, Artificial Sequence
  Description of Artificial Sequence: Synthetic antibody
caccatcaccaaggacacctccaaaaccaggtggtccttacaatgaccaacatggaccctgtggacacagccacatattactgtgcacacggcagtggctggaccacctttgactactggggccaggga

SEQ ID NO: 7672 - protein, 43 aa, Artificial Sequence
  Description of Artificial Sequence: Synthetic antibody
HHHQGHLQNQVVLTMTNMDPVDTATYYCAHGSGWTTFDYWGQG

SEQ ID NO: 7673 - DNA, 129 bp, Artificial Sequence
  Description of Artificial Sequence: Synthetic antibody
accatcaccaaggacacctccaaaaaccaggtggtccttacaatgaccaacatggaccctgtggacacagccacatattactgtgcacacggcagtggctggaccacctttgactactggggccaggga

SEQ ID NO: 7674 - protein, 43 aa, Artificial Sequence
  Description of Artificial Sequence: Synthetic antibody
TITKDTSKNQVVLTMTNMDPVDTATYYCAHGSGWTTFDYWGQG

SEQ ID NO: 7675 - protein, 18 aa, Artificial Sequence
  Description of Artificial Sequence: Synthetic antibody
CAREERIWWELLGYFQHW

SEQ ID NO: 7676 - DNA, 129 bp, Artificial Sequence
  Description of Artificial Sequence: Synthetic antibody
acgtccatcagtacagcctacatggagctgagcaggctgagatctgacgacacggccgtgtattactgtgcgagagaagagaggatctggtgggagctactcggatacttccagcactggggccagggc

SEQ ID NO: 7677 - protein, 43 aa, Artificial Sequence
  Description of Artificial Sequence: Synthetic antibody
TSISTAYMELSRLRSDDTAVYYCAREERIWWELLGYFQHWGQG

SEQ ID NO: 7678 - DNA, 129 bp, Artificial Sequence
  Description of Artificial Sequence: Synthetic antibody
acgtccatcagcacagcctacatggagctgagcaggctgagatctgacgacacggccgtgtattactgtgcgagagaagagaggatctggtgggagctactcggatacttccagcactggggccagggc

SEQ ID NO: 7679 - protein, 16 aa, Artificial Sequence
  Description of Artificial Sequence: Synthetic antibody
CAKDIGVIWQYGMDVW

SEQ ID NO: 7680 - DNA, 129 bp, Artificial Sequence
  Description of Artificial Sequence: Synthetic antibody
agagacaacgccaagaactccctgtatctgcaaatgaacagtctgagagctgaggacacggccttgtattactgtgcaaaagatattggggtgatatggcagtacggtatggacgtttggggccaaggg

SEQ ID NO: 7681 - protein, 43 aa, Artificial Sequence
  Description of Artificial Sequence: Synthetic antibody
RDNAKNSLYLQMNSLRAEDTALYYCAKDIGVIWQYGMDVWGQG

SEQ ID NO: 7682 - DNA, 129 bp, Artificial Sequence
  Description of Artificial Sequence: Synthetic antibody
agagacaacgccaagaactccctgtatctgcaaatgaacagtctgagagctgaggacacggccttgtattactgtgcaaaagatattggggtgatatggcagtacggtatggacgtctggggccaaggg

SEQ ID NO: 7683 - protein, 23 aa, Artificial Sequence
  Description of Artificial Sequence: Synthetic antibody
CARGRGPYIVVVVAAPSRWFDPW

SEQ ID NO: 7684 - DNA, 129 bp, Artificial Sequence
  Description of Artificial Sequence: Synthetic antibody
ttctccctgaagctgagctttgtgaccgccgcggacacggctgtgtattactgtgcgagaggccggggcccttatattgtagtggtggtagctgccccctcgaggtggttcgacccctggggccaggga

SEQ ID NO: 7685 - protein, 43 aa, Artificial Sequence
  Description of Artificial Sequence: Synthetic antibody
FSLKLSFVTAADTAVYYCARGRGPYIVVVVAAPSRWFDPWGQG

SEQ ID NO: 7686 - DNA, 129 bp, Artificial Sequence
  Description of Artificial Sequence: Synthetic antibody
ttctccctgaagctgagctctgtgaccgccgcggacacggctgtgtattactgtgcgagaggccggggcccttatattgtagtggtggtagctgccccctcgaggtggttcgacccctggggccaggga

SEQ ID NO: 7687 - protein, 43 aa, Artificial Sequence
  Description of Artificial Sequence: Synthetic antibody
FSLKLSSVTAADTAVYYCARGRGPYIVVVVAAPSRWFDPWGQG

SEQ ID NO: 7688 - protein, 16 aa, Artificial Sequence
  Description of Artificial Sequence: Synthetic antibody
CTTELGYCTSPSCSYW

SEQ ID NO: 7689 - DNA, 129 bp, Artificial Sequence
  Description of Artificial Sequence: Synthetic antibody
agagatgactcaaaaaacacgctgtatctgcaaatgaacagcctgaagaccgacgacacagccatatattactgtaccacagagttagggtattgtactagtcccagctgctcttactggggccaggga

SEQ ID NO: 7690 - protein, 43 aa, Artificial Sequence
  Description of Artificial Sequence: Synthetic antibody
RDDSKNTLYLQMNSLKTDDTAIYYCTTELGYCTSPSCSYWGQG

SEQ ID NO: 7691 - DNA, 129 bp, Artificial Sequence
  Description of Artificial Sequence: Synthetic antibody
agagatgactcaaaaaacacgctgtatctgcaaatgaacagcctgaaaaccgacgacacagccatatattactgtaccacagagttagggtattgtactagtcccagctgctcttactggggccaggga

SEQ ID NO: 7692 - protein, 20 aa, Artificial Sequence
  Description of Artificial Sequence: Synthetic antibody
CARGGCGGDCSDYYYGMDVW

SEQ ID NO: 7693 - DNA, 129 bp, Artificial Sequence
  Description of Artificial Sequence: Synthetic antibody
tacaacacgctgtatcttcaaatgaacagcctgagagccgaggacacggccgtgtattactgtgcgagagggggttgtggtggtgattgctcagactactactacggtatggacgtctggggccaaggg

SEQ ID NO: 7694 - protein, 43 aa, Artificial Sequence
  Description of Artificial Sequence: Synthetic antibody
YNTLYLQMNSLRAEDTAVYYCARGGCGGDCSDYYYGMDVWGQG

SEQ ID NO: 7695 - DNA, 129 bp, Artificial Sequence
  Description of Artificial Sequence: Synthetic antibody
aagaacacgctgtatcttcaaatgaacagcctgagagccgaggacacggccgtgtattactgtgcgagagggggttgtggtggtgattgctcagactactactacggtatggacgtctggggccaaggg

SEQ ID NO: 7696 - protein, 43 aa, Artificial Sequence
  Description of Artificial Sequence: Synthetic antibody
KNTLYLQMNSLRAEDTAVYYCARGGCGGDCSDYYYGMDVWGQG

SEQ ID NO: 7697 - protein, 21 aa, Artificial Sequence
  Description of Artificial Sequence: Synthetic antibody
CARDQRYRSSSHYYYYGMDVW

SEQ ID NO: 7698 - DNA, 129 bp, Artificial Sequence
  Description of Artificial Sequence: Synthetic antibody
aacacgctgtatcttcaaatgaacagcctgagagccgaggacacggccgtgtattactgtgcgagagatcagcggtataggagcagctcccactactactactacggtatggacgtctggggccaaggg

SEQ ID NO: 7699 - protein, 43 aa, Artificial Sequence
  Description of Artificial Sequence: Synthetic antibody
NTLYLQMNSLRAEDTAVYYCARDQRYRSSSHYYYYGMDVWGQG

SEQ ID NO: 7700 - DNA, 129 bp, Artificial Sequence
  Description of Artificial Sequence: Synthetic antibody
tacacgctgtatcttcaaatgaacagcctgagagccgaggacacggccgtgtattactgtgcgagagatcagcggtataggagcagctcccactactactactacggtatggacgtctggggccaaggg

SEQ ID NO: 7701 - protein, 43 aa, Artificial Sequence
  Description of Artificial Sequence: Synthetic antibody
YTLYLQMNSLRAEDTAVYYCARDQRYRSSSHYYYYGMDVWGQG

SEQ ID NO: 7702 - protein, 14 aa, Artificial Sequence
  Description of Artificial Sequence: Synthetic antibody
CAQTAGSRRPFDSW

SEQ ID NO: 7703 - DNA, 129 bp, Artificial Sequence
  Description of Artificial Sequence: Synthetic antibody
catcaccaaggacacctccaaaatgaggtggtcctcacaatgaccaacatggaccctgtggacacagccacatatcactgtgcacagacggcgggctcccgaagaccatttgactcctggggccaggga

SEQ ID NO: 7704 - protein, 43 aa, Artificial Sequence
  Description of Artificial Sequence: Synthetic antibody
HHQGHLQNEVVLTMTNMDPVDTATYHCAQTAGSRRPFDSWGQG

SEQ ID NO: 7705 - DNA, 129 bp, Artificial Sequence
  Description of Artificial Sequence: Synthetic antibody
atcaccaaggacacctccaaaaatgaggtggtcctcacaatgaccaacatggaccctgtggacacagccacatatcactgtgcacagacggcgggctcccgaagaccatttgactcctggggccaggga

SEQ ID NO: 7706 - protein, 43 aa, Artificial Sequence
  Description of Artificial Sequence: Synthetic antibody
ITKDTSKNEVVLTMTNMDPVDTATYHCAQTAGSRRPFDSWGQG

SEQ ID NO: 7707 - protein, 16 aa, Artificial Sequence
  Description of Artificial Sequence: Synthetic antibody
CARDRDIAAAGTHDYW

SEQ ID NO: 7708 - DNA, 129 bp, Artificial Sequence
  Description of Artificial Sequence: Synthetic antibody
agagacaacgccaagaacacgctgtatctgcaaatgaacagtctgagagccgaggacacggctgtgtattactgtgcaagagatagggatatagcagcagctggtacgcatgactactggggccaggga

SEQ ID NO: 7709 - protein, 43 aa, Artificial Sequence
  Description of Artificial Sequence: Synthetic antibody
RDNAKNTLYLQMNSLRAEDTAVYYCARDRDIAAAGTHDYWGQG

SEQ ID NO: 7710 - DNA, 129 bp, Artificial Sequence
  Description of Artificial Sequence: Synthetic antibody
gatcacaacgccaagaacacgctgtatctgcaaatgaacagtctgagagccgaggacacggctgtgtattactgtgcaagagatagggatatagcagcagctggtacgcatgactactggggccaggga

SEQ ID NO: 7711 - protein, 43 aa, Artificial Sequence
  Description of Artificial Sequence: Synthetic antibody
DHNAKNTLYLQMNSLRAEDTAVYYCARDRDIAAAGTHDYWGQG

SEQ ID NO: 7712 - protein, 16 aa, Artificial Sequence
  Description of Artificial Sequence: Synthetic antibody
CARGHDSSRSYGMDVW

SEQ ID NO: 7713 - DNA, 129 bp, Artificial Sequence
  Description of Artificial Sequence: Synthetic antibody
tggaacacctccataagcacagcctacatggagctgagcagcctgagatctgaggacacggccgtgtattactgtgcgagaggccacgacagcagccggagctacggtatggacgtctggggccaaggg

SEQ ID NO: 7714 - protein, 43 aa, Artificial Sequence
  Description of Artificial Sequence: Synthetic antibody
WNTSISTAYMELSSLRSEDTAVYYCARGHDSSRSYGMDVWGQG

SEQ ID NO: 7715 - DNA, 129 bp, Artificial Sequence
  Description of Artificial Sequence: Synthetic antibody
aggaacacctccataagcacagcctacatggagctgagcagcctgagatctgaggacacggccgtgtattactgtgcgagaggccacgacagcagccggagctacggtatggacgtctggggccaaggg

SEQ ID NO: 7716 - protein, 43 aa, Artificial Sequence
  Description of Artificial Sequence: Synthetic antibody
RNTSISTAYMELSSLRSEDTAVYYCARGHDSSRSYGMDVWGQG

SEQ ID NO: 7717 - protein, 13 aa, Artificial Sequence
  Description of Artificial Sequence: Synthetic antibody
CARIFGYNSFDYW

SEQ ID NO: 7718 - DNA, 129 bp, Artificial Sequence
  Description of Artificial Sequence: Synthetic antibody
accatctccaaggacgcctccaaaaaccaggtggtccttacaatgaccaacatggaccctgtggacacagccacgtattactgtgcgcggatatttggctacaattcgtttgactactggggccaggga

SEQ ID NO: 7719 - protein, 43 aa, Artificial Sequence
  Description of Artificial Sequence: Synthetic antibody
TISKDASKNQVVLTMTNMDPVDTATYYCARIFGYNSFDYWGQG

SEQ ID NO: 7720 - DNA, 129 bp, Artificial Sequence
  Description of Artificial Sequence: Synthetic antibody
accatctccaaggacacctccaaaaaccaggtggtccttacaatgaccaacatggaccctgtggacacagccacgtattactgtgcacggatatttggctacaattcgtttgactactggggccaggga

SEQ ID NO: 7721 - protein, 43 aa, Artificial Sequence
  Description of Artificial Sequence: Synthetic antibody
TISKDTSKNQVVLTMTNMDPVDTATYYCARIFGYNSFDYWGQG

SEQ ID NO: 7722 - protein, 22 aa, Artificial Sequence
  Description of Artificial Sequence: Synthetic antibody
CAKVPITMVRGVRRNHNWFDPW

SEQ ID NO: 7723 - DNA, 129 bp, Artificial Sequence
  Description of Artificial Sequence: Synthetic antibody
tcgatgtatctgcaaatgaacagcctgagagccgaggacacggccgtatattactgtgcgaaggttcccattactatggttcggggagtccgccgaaaccacaactggttcgacccctggggccaggga

SEQ ID NO: 7724 - protein, 43 aa, Artificial Sequence
  Description of Artificial Sequence: Synthetic antibody
SMYLQMNSLRAEDTAVYYCAKVPITMVRGVRRNHNWFDPWGQG

SEQ ID NO: 7725 - DNA, 129 bp, Artificial Sequence
  Description of Artificial Sequence: Synthetic antibody
acgctgtatctgcaaatgaacagcctgagagccgaggacacggccgtatattactgtgcgaaggttcccattactatggttcggggagtccgccgaaaccacaactggttcgacccctggggccaggga

SEQ ID NO: 7726 - protein, 43 aa, Artificial Sequence
  Description of Artificial Sequence: Synthetic antibody
TLYLQMNSLRAEDTAVYYCAKVPITMVRGVRRNHNWFDPWGQG

SEQ ID NO: 7727 - protein, 18 aa, Artificial Sequence
  Description of Artificial Sequence: Synthetic antibody
CAKAMTTVTTGYWGFDNW

SEQ ID NO: 7728 - DNA, 129 bp, Artificial Sequence
  Description of Artificial Sequence: Synthetic antibody
aacgccaagaagtctctgtatctgcaaatgaacagtctgagagctgaggacacggccttgtattactgtgcaaaagccatgactaccgtgaccacgggttattggggctttgacaactggggccaggga

SEQ ID NO: 7729 - protein, 43 aa, Artificial Sequence
  Description of Artificial Sequence: Synthetic antibody
NAKKSLYLQMNSLRAEDTALYYCAKAMTTVTTGYWGFDNWGQG

SEQ ID NO: 7730 - DNA, 129 bp, Artificial Sequence
  Description of Artificial Sequence: Synthetic antibody
aacgccaagaactctctgtatctgcaaatgaacagtctgagagctgaggacacggccttgtattactgtgcaaaagccatgactacggtgactacgggttattggggctttgacaactggggccaggga

SEQ ID NO: 7731 - protein, 43 aa, Artificial Sequence
  Description of Artificial Sequence: Synthetic antibody
NAKNSLYLQMNSLRAEDTALYYCAKAMTTVTTGYWGFDNWGQG

SEQ ID NO: 7732 - protein, 20 aa, Artificial Sequence
  Description of Artificial Sequence: Synthetic antibody
CARHWYSSGLKRVGNYFDYW

SEQ ID NO: 7733 - DNA, 129 bp, Artificial Sequence
  Description of Artificial Sequence: Synthetic antibody
caagaaccagtctccctgaagctgagctctgtgaccgccgcagacacggctgtgtattactgtgcgagacactggtatagcagtggattaaaaagggtggggaactactttgactactggggccaggga

SEQ ID NO: 7734 - protein, 43 aa, Artificial Sequence
  Description of Artificial Sequence: Synthetic antibody
QEPVSLKLSSVTAADTAVYYCARHWYSSGLKRVGNYFDYWGQG

SEQ ID NO: 7735 - DNA, 129 bp, Artificial Sequence
  Description of Artificial Sequence: Synthetic antibody
aagaaccagttctccctgaagctgagctctgtgaccgccgcagacacggctgtgtattactgtgcgagacactggtatagcagtggattaaaaagggtggggaactactttgactactggggccaggga

SEQ ID NO: 7736 - protein, 43 aa, Artificial Sequence
  Description of Artificial Sequence: Synthetic antibody
KNQFSLKLSSVTAADTAVYYCARHWYSSGLKRVGNYFDYWGQG

SEQ ID NO: 7737 - protein, 20 aa, Artificial Sequence
  Description of Artificial Sequence: Synthetic antibody
CASEACSSTSCYSGTAHDYW

SEQ ID NO: 7738 - DNA, 129 bp, Artificial Sequence
  Description of Artificial Sequence: Synthetic antibody
acgagcacagcctacatggagctgagcagcctgagatctgaggacacggccgtgtattgctgtgcgagtgaagcttgtagtagtaccagctgctattcgggtacagctcatgactactggggccaggga

SEQ ID NO: 7739 - protein, 43 aa, Artificial Sequence
  Description of Artificial Sequence: Synthetic antibody
TSTAYMELSSLRSEDTAVYCCASEACSSTSCYSGTAHDYWGQG

SEQ ID NO: 7740 - DNA, 129 bp, Artificial Sequence
  Description of Artificial Sequence: Synthetic antibody
acgagcacagcctacatggagctgagcagcctgagatctgaggacacggccgtgtattactgtgcgagtgaagcttgtagtagtaccagctgctattcgggtacagctcatgactactggggccaggga

SEQ ID NO: 7741 - protein, 43 aa, Artificial Sequence
  Description of Artificial Sequence: Synthetic antibody
TSTAYMELSSLRSEDTAVYYCASEACSSTSCYSGTAHDYWGQG

SEQ ID NO: 7742 - protein, 13 aa, Artificial Sequence
  Description of Artificial Sequence: Synthetic antibody
CARNVERNAFDIW

SEQ ID NO: 7743 - DNA, 129 bp, Artificial Sequence
  Description of Artificial Sequence: Synthetic antibody
caccatctccaaggacacctccaaaaccaggtggtccttacaatgaccaacatggaccctgtggacacagccacgtattactgtgcacggaacgtagagagaaatgcttttgatatctggggccaaggg

SEQ ID NO: 7744 - protein, 43 aa, Artificial Sequence
  Description of Artificial Sequence: Synthetic antibody
HHLQGHLQNQVVLTMTNMDPVDTATYYCARNVERNAFDIWGQG

SEQ ID NO: 7745 - DNA, 129 bp, Artificial Sequence
  Description of Artificial Sequence: Synthetic antibody
accatctccaaggacacctccaaaaaccaggtggtccttacaatgaccaacatggaccctgtggacacagccacgtattactgtgcacggaacgtagagagaaatgcttttgatatctggggccaaggg

SEQ ID NO: 7746 - protein, 43 aa, Artificial Sequence
  Description of Artificial Sequence: Synthetic antibody
TISKDTSKNQVVLTMTNMDPVDTATYYCARNVERNAFDIWGQG

SEQ ID NO: 7747 - protein, 17 aa, Artificial Sequence
  Description of Artificial Sequence: Synthetic antibody
CVKGTFSTTLGTHLDSW

SEQ ID NO: 7748 - DNA, 129 bp, Artificial Sequence
  Description of Artificial Sequence: Synthetic antibody
gacgacgccaataactccctgtttctacaaatgaacagtctgagaagtgaggacacggccctctattcctgtgtaaaagggacatttagcaccaccttggggacccaccttgactcctggggccaggga

SEQ ID NO: 7749 - protein, 43 aa, Artificial Sequence
  Description of Artificial Sequence: Synthetic antibody
DDANNSLFLQMNSLRSEDTALYSCVKGTFSTTLGTHLDSWGQG

SEQ ID NO: 7750 - DNA, 129 bp, Artificial Sequence
  Description of Artificial Sequence: Synthetic antibody
gacgacgccaagaactccctgtttctacaaatgaacagtctgagaagtgaggacacggccctctattcctgtgtaaaagggacatttagcaccaccttggggacccaccttgactcctggggccaggga

SEQ ID NO: 7751 - protein, 43 aa, Artificial Sequence
  Description of Artificial Sequence: Synthetic antibody
DDAKNSLFLQMNSLRSEDTALYSCVKGTFSTTLGTHLDSWGQG

SEQ ID NO: 7752 - protein, 27 aa, Artificial Sequence
  Description of Artificial Sequence: Synthetic antibody
CAKGGTDRIAAAGPPRPGDYYYGMDVW

SEQ ID NO: 7753 - DNA, 129 bp, Artificial Sequence
  Description of Artificial Sequence: Synthetic antibody
ttgaacagcctgagagccgaggacacggccgtatattactgcgcgaaaggagggacggaccgtatagcagcagctggaccaccccgccccggtgactactactacggtatggacgtctggggccaaggg

SEQ ID NO: 7754 - protein, 43 aa, Artificial Sequence
  Description of Artificial Sequence: Synthetic antibody
LNSLRAEDTAVYYCAKGGTDRIAAAGPPRPGDYYYGMDVWGQG

SEQ ID NO: 7755 - DNA, 129 bp, Artificial Sequence
  Description of Artificial Sequence: Synthetic antibody
atgaacagcctgagagccgaggacacggccgtatattactgtgcgaaaggagggacggaccgtatagcagcagctggaccaccccgccccggtgactactactacggtatggacgtctggggccaaggg

SEQ ID NO: 7756 - protein, 43 aa, Artificial Sequence
  Description of Artificial Sequence: Synthetic antibody
MNSLRAEDTAVYYCAKGGTDRIAAAGPPRPGDYYYGMDVWGQG

SEQ ID NO: 7757 - protein, 25 aa, Artificial Sequence
  Description of Artificial Sequence: Synthetic antibody
CARGAYCGGDCLVFLRNLFSWFDPW

SEQ ID NO: 7758 - DNA, 129 bp, Artificial Sequence
  Description of Artificial Sequence: Synthetic antibody
ttggagctgagcagcctgagatctgaggacacggccgtgtattactgtgcgagaggggcatattgtggtggtgactgcttagtattcctacggaatctcttcagctggttcgacccctggggccaggga

SEQ ID NO: 7759 - protein, 43 aa, Artificial Sequence
  Description of Artificial Sequence: Synthetic antibody
LELSSLRSEDTAVYYCARGAYCGGDCLVFLRNLFSWFDPWGQG

SEQ ID NO: 7760 - DNA, 129 bp, Artificial Sequence
  Description of Artificial Sequence: Synthetic antibody
atggagctgagcagcctgagatctgaggacacggccgtgtattactgtgcgagaggggcatattgtggtggtgactgcttagtattcctacggaatctcttcagctggttcgacccctggggccaggga

SEQ ID NO: 7761 - protein, 43 aa, Artificial Sequence
  Description of Artificial Sequence: Synthetic antibody
MELSSLRSEDTAVYYCARGAYCGGDCLVFLRNLFSWFDPWGQG

SEQ ID NO: 7762 - protein, 19 aa, Artificial Sequence
  Description of Artificial Sequence: Synthetic antibody
CASIAYSSSRYGLYAFDIW

SEQ ID NO: 7763 - DNA, 129 bp, Artificial Sequence
  Description of Artificial Sequence: Synthetic antibody
gccaagaactcgctgtatctgcaaatgaacagtctgagagccgaggacacggctgtgtattactgtgcaagtatcgcgtatagcagcagccggtacgggttgtatgcttttgatatctggggccaaggg

SEQ ID NO: 7764 - protein, 43 aa, Artificial Sequence
  Description of Artificial Sequence: Synthetic antibody
AKNSLYLQMNSLRAEDTAVYYCASIAYSSSRYGLYAFDIWGQG

SEQ ID NO: 7765 - DNA, 129 bp, Artificial Sequence
  Description of Artificial Sequence: Synthetic antibody
gccaagaacacgctgtatctgcaaatgaacagtctgagagccgaggacacggctgtgtattactgtgcaagtatcgcgtatagcagcagccggtacgggttgtatgcttttgatatctggggccaaggg

SEQ ID NO: 7766 - protein, 43 aa, Artificial Sequence
  Description of Artificial Sequence: Synthetic antibody
AKNTLYLQMNSLRAEDTAVYYCASIAYSSSRYGLYAFDIWGQG

SEQ ID NO: 7767 - protein, 19 aa, Artificial Sequence
  Description of Artificial Sequence: Synthetic antibody
CTTDRWYSSSWGSGGFDYW

SEQ ID NO: 7768 - DNA, 129 bp, Artificial Sequence
  Description of Artificial Sequence: Synthetic antibody
tcaaaaagcacgctgtatctgcaaatgaacagcctgaaaaccgaggacacagccgtgtgttactgtaccacagataggtggtatagcagcagctggggatcggggggctttgactactggggccaggga

SEQ ID NO: 7769 - protein, 43 aa, Artificial Sequence
  Description of Artificial Sequence: Synthetic antibody
SKSTLYLQMNSLKTEDTAVCYCTTDRWYSSSWGSGGFDYWGQG

SEQ ID NO: 7770 - DNA, 129 bp, Artificial Sequence
  Description of Artificial Sequence: Synthetic antibody
tcaaaaaacacgctgtatctgcaaatgaacagcctgaaaaccgaggacacagccgtgtattactgtaccacagataggtggtatagcagcagctggggatcggggggctttgactactggggccaggga

SEQ ID NO: 7771 - protein, 43 aa, Artificial Sequence
  Description of Artificial Sequence: Synthetic antibody
SKNTLYLQMNSLKTEDTAVYYCTTDRWYSSSWGSGGFDYWGQG

SEQ ID NO: 7772 - protein, 18 aa, Artificial Sequence
  Description of Artificial Sequence: Synthetic antibody
CAKDLSVWQWLVLGFDYW

SEQ ID NO: 7773 - DNA, 129 bp, Artificial Sequence
  Description of Artificial Sequence: Synthetic antibody
aattccaagaacacgctgtatctgcaaatgaacagcctgggagccgaggacacggccgtatattactgtgcgaaagatctttccgtatggcagtggctggtgctgggctttgattactggggccaggga

SEQ ID NO: 7774 - protein, 43 aa, Artificial Sequence
  Description of Artificial Sequence: Synthetic antibody
NSKNTLYLQMNSLGAEDTAVYYCAKDLSVWQWLVLGFDYWGQG

SEQ ID NO: 7775 - DNA, 129 bp, Artificial Sequence
  Description of Artificial Sequence: Synthetic antibody
aattccaagaacacgctgtatctgcaaatgaacagcctgagagccgaggacacggccgtatattactgtgcgaaagatctttccgtatggcagtggctggtgctgggctttgactactggggccaggga

SEQ ID NO: 7776 - protein, 43 aa, Artificial Sequence
  Description of Artificial Sequence: Synthetic antibody
NSKNTLYLQMNSLRAEDTAVYYCAKDLSVWQWLVLGFDYWGQG

SEQ ID NO: 7777 - protein, 16 aa, Artificial Sequence
  Description of Artificial Sequence: Synthetic antibody
CARASPGAWGDWFDPW

SEQ ID NO: 7778 - DNA, 129 bp, Artificial Sequence
  Description of Artificial Sequence: Synthetic antibody
caaggacacctccaaaaccaggtggtccttacaatgaccaacatggaccctgtggacacagccacatattactgtgcacgcgcatcccctggggcgtggggggactggttcgacccctggggccaggga

SEQ ID NO: 7779 - protein, 43 aa, Artificial Sequence
  Description of Artificial Sequence: Synthetic antibody
QGHLQNQVVLTMTNMDPVDTATYYCARASPGAWGDWFDPWGQG

SEQ ID NO: 7780 - DNA, 129 bp, Artificial Sequence
  Description of Artificial Sequence: Synthetic antibody
aaggacacctccaaaaaccaggtggtccttacaatgaccaacatggaccctgtggacacagccacatattactgtgcacgcgcatcccctggggcgtggggggactggttcgacccctggggccaggga

SEQ ID NO: 7781 - protein, 43 aa, Artificial Sequence
  Description of Artificial Sequence: Synthetic antibody
KDTSKNQVVLTMTNMDPVDTATYYCARASPGAWGDWFDPWGQG

SEQ ID NO: 7782 - protein, 13 aa, Artificial Sequence
  Description of Artificial Sequence: Synthetic antibody
CAHRLFGSSWGEW

SEQ ID NO: 7783 - DNA, 129 bp, Artificial Sequence
  Description of Artificial Sequence: Synthetic antibody
caccatcaccaaggacacctccaaaaccaggtgatccttacagtgaccaacatggaccctgtggacacagccacatattactgtgcacacagactttttggcagcagctggggggagtggggccaggga

SEQ ID NO: 7784 - protein, 43 aa, Artificial Sequence
  Description of Artificial Sequence: Synthetic antibody
HHHQGHLQNQVILTVTNMDPVDTATYYCAHRLFGSSWGEWGQG

SEQ ID NO: 7785 - DNA, 129 bp, Artificial Sequence
  Description of Artificial Sequence: Synthetic antibody
accatcaccaaggacacctccaaaaaccaggtgatccttacagtgaccaacatggaccctgtggacacagccacatattactgtgcacacagactttttggcagcagctggggggagtggggccaggga

SEQ ID NO: 7786 - protein, 43 aa, Artificial Sequence
  Description of Artificial Sequence: Synthetic antibody
TITKDTSKNQVILTVTNMDPVDTATYYCAHRLFGSSWGEWGQG

SEQ ID NO: 7787 - protein, 20 aa, Artificial Sequence
  Description of Artificial Sequence: Synthetic antibody
CARRAGAQLVRHDSYYFDYW

SEQ ID NO: 7788 - DNA, 129 bp, Artificial Sequence
  Description of Artificial Sequence: Synthetic antibody
acgagcacagcctacatggagctgagcagcctgagatctgaggacacggccgtgtattactgtgcgagacgggccggggcgcagctcgtccgccacgactcttactactttgactactggggccaggga

SEQ ID NO: 7789 - protein, 43 aa, Artificial Sequence
  Description of Artificial Sequence: Synthetic antibody
TSTAYMELSSLRSEDTAVYYCARRAGAQLVRHDSYYFDYWGQG

SEQ ID NO: 7790 - DNA, 129 bp, Artificial Sequence
  Description of Artificial Sequence: Synthetic antibody
acgaccacagcctacatggagctgagcagcctgagatctgaggacacggccgtgtattactgtgcgagacgggccggggcgcagctcgtccgccacgactcttactactttgactactggggccaggga

SEQ ID NO: 7791 - protein, 43 aa, Artificial Sequence
  Description of Artificial Sequence: Synthetic antibody
TTTAYMELSSLRSEDTAVYYCARRAGAQLVRHDSYYFDYWGQG

SEQ ID NO: 7792 - protein, 21 aa, Artificial Sequence
  Description of Artificial Sequence: Synthetic antibody
CASRREDIVVVVAAHDAFDIW

SEQ ID NO: 7793 - DNA, 129 bp, Artificial Sequence
  Description of Artificial Sequence: Synthetic antibody
agcactgcctacatggagctgagcagcctgagatctgaggacacggccgtgtattactgtgcgagccgccgagaggatattgtagtggtggtagctgctcatgatgcttttgatatctggggccaaggg

SEQ ID NO: 7794 - protein, 43 aa, Artificial Sequence
  Description of Artificial Sequence: Synthetic antibody
STAYMELSSLRSEDTAVYYCASRREDIVVVVAAHDAFDIWGQG

SEQ ID NO: 7795 - DNA, 129 bp, Artificial Sequence
  Description of Artificial Sequence: Synthetic antibody
agcacagcctacatggagctgagcagcctgagatctgaggacacggccgtgtattactgtgcgagccgccgagaggatattgtagtggtggtagctgctcatgatgcttttgatatctggggccaaggg

SEQ ID NO: 7796 - protein, 17 aa, Artificial Sequence
  Description of Artificial Sequence: Synthetic antibody
CAIRKLTGDTRDAFDIW

SEQ ID NO: 7797 - DNA, 129 bp, Artificial Sequence
  Description of Artificial Sequence: Synthetic antibody
gacaggtccaagaaccagttctccctgaagctgagctctgtgaccgccgcggacacggccgtgtattactgtgccatacgaaagctaactggggacacccgtgatgcttttgatatctggggccaaggg

SEQ ID NO: 7798 - protein, 43 aa, Artificial Sequence
  Description of Artificial Sequence: Synthetic antibody
DRSKNQFSLKLSSVTAADTAVYYCAIRKLTGDTRDAFDIWGQG

SEQ ID NO: 7799 - DNA, 129 bp, Artificial Sequence
  Description of Artificial Sequence: Synthetic antibody
gacaggtccaagaaccagttctccctgaagctgagccctgtgaccgccgcggacacggccgtgtattactgtgccatacgaaagctaactggggacacccgtgatgcttttgatatctggggccaaggg

SEQ ID NO: 7800 - protein, 43 aa, Artificial Sequence
  Description of Artificial Sequence: Synthetic antibody
DRSKNQFSLKLSPVTAADTAVYYCAIRKLTGDTRDAFDIWGQG

SEQ ID NO: 7801 - protein, 16 aa, Artificial Sequence
  Description of Artificial Sequence: Synthetic antibody
CAKDIGYSSSWSFDYW

SEQ ID NO: 7802 - DNA, 129 bp, Artificial Sequence
  Description of Artificial Sequence: Synthetic antibody
agagacaacagcaaaaactccctgtatctgcaaatgaacagtctgagaactgaggacaccgccttgtattactgtgcaaaggatatcggctatagcagcagctggtcctttgactactggggccaggga

SEQ ID NO: 7803 - protein, 43 aa, Artificial Sequence
  Description of Artificial Sequence: Synthetic antibody
RDNSKNSLYLQMNSLRTEDTALYYCAKDIGYSSSWSFDYWGQG

SEQ ID NO: 7804 - DNA, 129 bp, Artificial Sequence
  Description of Artificial Sequence: Synthetic antibody
agagacaacagcaaaaactccctgtatctgcaaatgaacagtctgagaactgaggacaccgccttgtattactgtgcaaaagatatcggctatagcagcagctggtcctttgactactggggccaggga

SEQ ID NO: 7805 - protein, 18 aa, Artificial Sequence
  Description of Artificial Sequence: Synthetic antibody
CAKGDSGSYYGSSYFDYW

SEQ ID NO: 7806 - DNA, 129 bp, Artificial Sequence
  Description of Artificial Sequence: Synthetic antibody
aacgccaagaactccctgtatctgcaaatgaacagtctgagagctgaggacacggccttgtattactgtgcaaaaggggatagtgggagctactacgggtcgtcctactttgactactggggccaggga

SEQ ID NO: 7807 - protein, 43 aa, Artificial Sequence
  Description of Artificial Sequence: Synthetic antibody
NAKNSLYLQMNSLRAEDTALYYCAKGDSGSYYGSSYFDYWGQG

SEQ ID NO: 7808 - DNA, 129 bp, Artificial Sequence
  Description of Artificial Sequence: Synthetic antibody
aacgccaagaactccctgtatctgcaaatgaacagtctgagagctgaggacacggccctgtattactgtgcaaaaggggatagtgggagctactacgggtcgtcctactttgactactggggccaggga

SEQ ID NO: 7809 - protein, 19 aa, Artificial Sequence
  Description of Artificial Sequence: Synthetic antibody
CARTALGDGYNTGWYFDLW

SEQ ID NO: 7810 - DNA, 129 bp, Artificial Sequence
  Description of Artificial Sequence: Synthetic antibody
tccaaaagccaggtggtccttaccatgaccaacatggaccctgtggacacagccacatattactgtgcacggacagccctgggagatggctacaatacgggctggtacttcgatctctggggccgtggc

SEQ ID NO: 7811 - protein, 43 aa, Artificial Sequence
  Description of Artificial Sequence: Synthetic antibody
SKSQVVLTMTNMDPVDTATYYCARTALGDGYNTGWYFDLWGRG

SEQ ID NO: 7812 - DNA, 129 bp, Artificial Sequence
  Description of Artificial Sequence: Synthetic antibody
ctccaaagccaggtggtccttaccatgaccaacatggaccctgtggacacagccacatattactgtgcacggacagccctgggagatggctacaatacgggctggtacttcgatctctggggccgtggc

SEQ ID NO: 7813 - protein, 43 aa, Artificial Sequence
  Description of Artificial Sequence: Synthetic antibody
LQSQVVLTMTNMDPVDTATYYCARTALGDGYNTGWYFDLWGRG

SEQ ID NO: 7814 - protein, 14 aa, Artificial Sequence
  Description of Artificial Sequence: Synthetic antibody
CAWNSDYDLGGDYW

SEQ ID NO: 7815 - DNA, 129 bp, Artificial Sequence
  Description of Artificial Sequence: Synthetic antibody
attaccgcggacaaatccacgagcacagcctacatggaattgagcagcctgagttctgaggacacggccgtatattactgtgcgtggaatagtgactacgatttggggggtgactactggggccaggga

SEQ ID NO: 7816 - protein, 43 aa, Artificial Sequence
  Description of Artificial Sequence: Synthetic antibody
ITADKSTSTAYMELSSLSSEDTAVYYCAWNSDYDLGGDYWGQG

SEQ ID NO: 7817 - DNA, 129 bp, Artificial Sequence
  Description of Artificial Sequence: Synthetic antibody
attaccgcgcacaaatccacgagcacagcctacatggaattgagcagcctgagttctgaggacacggccgtatattactgtgcgtggaatagtgactacgatttggggggtgactactggggccaggga

SEQ ID NO: 7818 - protein, 43 aa, Artificial Sequence
  Description of Artificial Sequence: Synthetic antibody
ITAHKSTSTAYMELSSLSSEDTAVYYCAWNSDYDLGGDYWGQG

SEQ ID NO: 7819 - protein, 16 aa, Artificial Sequence
  Description of Artificial Sequence: Synthetic antibody
CAHSTYSSSPGGMDVW

SEQ ID NO: 7820 - DNA, 129 bp, Artificial Sequence
  Description of Artificial Sequence: Synthetic antibody
caaggacacctccaaaaccaggtggtccttacaatgaccaacatggaccctgtggacacagccacatattactgtgcacacagtacgtatagcagctcacccggcggtatggacgtctggggccaaggg

SEQ ID NO: 7821 - protein, 43 aa, Artificial Sequence
  Description of Artificial Sequence: Synthetic antibody
QGHLQNQVVLTMTNMDPVDTATYYCAHSTYSSSPGGMDVWGQG

SEQ ID NO: 7822 - DNA, 129 bp, Artificial Sequence
  Description of Artificial Sequence: Synthetic antibody
aaggacacctccaaaaaccaggtggtccttacaatgaccaacatggaccctgtggacacagccacatattactgtgcacacagtacgtatagcagctcacccggcggtatggacgtctggggccaaggg

SEQ ID NO: 7823 - protein, 43 aa, Artificial Sequence
  Description of Artificial Sequence: Synthetic antibody
KDTSKNQVVLTMTNMDPVDTATYYCAHSTYSSSPGGMDVWGQG

SEQ ID NO: 7824 - protein, 14 aa, Artificial Sequence
  Description of Artificial Sequence: Synthetic antibody
CAKGGSLWFGDHPW

SEQ ID NO: 7825 - DNA, 129 bp, Artificial Sequence
  Description of Artificial Sequence: Synthetic antibody
atctccatagataattccaagaacacgctttatctgcatatgaacagtctgagagccgacgacacggccgtatattactgtgcgaaagggggctcactctggttcggggaccacccctggggccaggga

SEQ ID NO: 7826 - protein, 43 aa, Artificial Sequence
  Description of Artificial Sequence: Synthetic antibody
ISIDNSKNTLYLHMNSLRADDTAVYYCAKGGSLWFGDHPWGQG

SEQ ID NO: 7827 - DNA, 129 bp, Artificial Sequence
  Description of Artificial Sequence: Synthetic antibody
atctccagagataattccaagaacacgctttatctgcatatgaacagtctgagagccgacgacacggccgtatattactgtgcgaaagggggctcactctggttcggggaccacccctggggccaggga

SEQ ID NO: 7828 - protein, 43 aa, Artificial Sequence
  Description of Artificial Sequence: Synthetic antibody
ISRDNSKNTLYLHMNSLRADDTAVYYCAKGGSLWFGDHPWGQG

SEQ ID NO: 7829 - protein, 17 aa, Artificial Sequence
  Description of Artificial Sequence: Synthetic antibody
CARGFIAAAWRGGFDYW

SEQ ID NO: 7830 - DNA, 129 bp, Artificial Sequence
  Description of Artificial Sequence: Synthetic antibody
gacaatgccaagaactcactgtatctgcaaatgaacagcctgagagacgaggacacggctgtgtattactgtgcgagaggctttatagcagcagcttggagggggggctttgactactggggccaggga

SEQ ID NO: 7831 - protein, 43 aa, Artificial Sequence
  Description of Artificial Sequence: Synthetic antibody
DNAKNSLYLQMNSLRDEDTAVYYCARGFIAAAWRGGFDYWGQG

SEQ ID NO: 7832 - DNA, 129 bp, Artificial Sequence
  Description of Artificial Sequence: Synthetic antibody
gacaatgccaacaactcactgtatctgcaaatgaacagcctgagagacgaggacacggctgtgtattactgtgcgagaggctttatagcagcagcttggagggggggctttgactactggggccaggga

SEQ ID NO: 7833 - protein, 43 aa, Artificial Sequence
  Description of Artificial Sequence: Synthetic antibody
DNANNSLYLQMNSLRDEDTAVYYCARGFIAAAWRGGFDYWGQG

SEQ ID NO: 7834 - protein, 15 aa, Artificial Sequence
  Description of Artificial Sequence: Synthetic antibody
CVRAAGYSSGWIDYW

SEQ ID NO: 7835 - DNA, 129 bp, Artificial Sequence
  Description of Artificial Sequence: Synthetic antibody
aaccccgacacatccaagaaccaattctccctgcagctgaactctgtgactcccgaggacacggctgtttattactgtgtaagagccgccgggtatagcagtggctggattgactactggggccgggga

SEQ ID NO: 7836 - protein, 43 aa, Artificial Sequence
  Description of Artificial Sequence: Synthetic antibody
NPDTSKNQFSLQLNSVTPEDTAVYYCVRAAGYSSGWIDYWGRG

SEQ ID NO: 7837 - DNA, 129 bp, Artificial Sequence
  Description of Artificial Sequence: Synthetic antibody
aaccccgacacatccaagaaccaattctccctgcagctgaactctgtgactcccgaggacacggctgtttattactgtgtaagagccgccgggtatagcagtggctggattgactactggggccaggga

SEQ ID NO: 7838 - protein, 43 aa, Artificial Sequence
  Description of Artificial Sequence: Synthetic antibody
NPDTSKNQFSLQLNSVTPEDTAVYYCVRAAGYSSGWIDYWGQG

SEQ ID NO: 7839 - protein, 23 aa, Artificial Sequence
  Description of Artificial Sequence: Synthetic antibody
CARGPLRESAAGTVDYYYGMDVW

SEQ ID NO: 7840 - DNA, 129 bp, Artificial Sequence
  Description of Artificial Sequence: Synthetic antibody
gcctacttggagctgagcagcctgagatctgaggacacggccgtgtattactgtgcgagaggcccgttgcgagagtcagcagctggtacggtagactactactacggtatggacgtctggggccaaggg

SEQ ID NO: 7841 - protein, 43 aa, Artificial Sequence
  Description of Artificial Sequence: Synthetic antibody
AYLELSSLRSEDTAVYYCARGPLRESAAGTVDYYYGMDVWGQG

SEQ ID NO: 7842 - DNA, 129 bp, Artificial Sequence
  Description of Artificial Sequence: Synthetic antibody
gcctacatggagctgagcagcctgagatctgaggacacggccgtgtattactgtgcgagaggcccgttgcgagagtcagcagctggtacggtagactactactacggtatggacgtctggggccaaggg

SEQ ID NO: 7843 - protein, 43 aa, Artificial Sequence
  Description of Artificial Sequence: Synthetic antibody
AYMELSSLRSEDTAVYYCARGPLRESAAGTVDYYYGMDVWGQG

SEQ ID NO: 7844 - protein, 18 aa, Artificial Sequence
  Description of Artificial Sequence: Synthetic antibody
CVRRANNGIGSQHFFDYW

SEQ ID NO: 7845 - DNA, 129 bp, Artificial Sequence
  Description of Artificial Sequence: Synthetic antibody
acgtccgtcaacacagcctacatggggctgagcaggctgagatctgacgacacggccgtgtattattgtgtgaggcgagcaaacaacggtatagggagtcagcacttctttgactactggggccaggga

SEQ ID NO: 7846 - protein, 43 aa, Artificial Sequence
  Description of Artificial Sequence: Synthetic antibody
TSVNTAYMGLSRLRSDDTAVYYCVRRANNGIGSQHFFDYWGQG

SEQ ID NO: 7847 - DNA, 129 bp, Artificial Sequence
  Description of Artificial Sequence: Synthetic antibody
acgtccgtcaacacagcctacatggagctgagcaggctgagatctgacgacacggccgtgtattattgtgtgaggcgagcaaacaacggtatagggagtcagcacttctttgactactggggccaggga

SEQ ID NO: 7848 - protein, 43 aa, Artificial Sequence
  Description of Artificial Sequence: Synthetic antibody
TSVNTAYMELSRLRSDDTAVYYCVRRANNGIGSQHFFDYWGQG

SEQ ID NO: 7849 - protein, 16 aa, Artificial Sequence
  Description of Artificial Sequence: Synthetic antibody
CASDPDYGGKSYFDNW

SEQ ID NO: 7850 - DNA, 129 bp, Artificial Sequence
  Description of Artificial Sequence: Synthetic antibody
agagacaacgccaagaatacgctctttctgcaaatgaacagtctgagagccgaggacacgtctgtgtattattgtgcaagcgatcccgactacggtggtaagagctactttgacaactggggccaggga

SEQ ID NO: 7851 - protein, 43 aa, Artificial Sequence
  Description of Artificial Sequence: Synthetic antibody
RDNAKNTLFLQMNSLRAEDTSVYYCASDPDYGGKSYFDNWGQG

SEQ ID NO: 7852 - DNA, 129 bp, Artificial Sequence
  Description of Artificial Sequence: Synthetic antibody
agagacaacgccaagaatacgccctttctgcaaatgaacagtctgagagccgaggacacgtctgtgtattattgtgcaagcgatcccgactacggtggtaagagctactttgacaactggggccaggga

SEQ ID NO: 7853 - protein, 43 aa, Artificial Sequence
  Description of Artificial Sequence: Synthetic antibody
RDNAKNTPFLQMNSLRAEDTSVYYCASDPDYGGKSYFDNWGQG

SEQ ID NO: 7854 - protein, 17 aa, Artificial Sequence
  Description of Artificial Sequence: Synthetic antibody
CARASARPGVATNLDFW

SEQ ID NO: 7855 - DNA, 129 bp, Artificial Sequence
  Description of Artificial Sequence: Synthetic antibody
gacacctctgtcagcacgacatatctgcatatcagcagcctaaaggctgaggacactgccgtatattactgtgcgagagcgtctgcgcgtccgggtgttgcaacaaacttagacttctggggccaggga

SEQ ID NO: 7856 - protein, 43 aa, Artificial Sequence
  Description of Artificial Sequence: Synthetic antibody
DTSVSTTYLHISSLKAEDTAVYYCARASARPGVATNLDFWGQG

SEQ ID NO: 7857 - DNA, 129 bp, Artificial Sequence
  Description of Artificial Sequence: Synthetic antibody
gacacctctgtcagcacgacatatctgcacatcagcagcctaaaggctgaggacactgccgtatattactgtgcgagagcgtctgcgcgtccgggtgttgcaacaaacttagacttctggggccaggga

SEQ ID NO: 7858 - protein, 14 aa, Artificial Sequence
  Description of Artificial Sequence: Synthetic antibody
CECKLRFLPFRVYW

SEQ ID NO: 7859 - DNA, 129 bp, Artificial Sequence
  Description of Artificial Sequence: Synthetic antibody
aatctcaagcaacaccctttaagtgcagtctgccttacaatgaccaatctgaaagccaaggacaaggtcatgtattactgtgagtgcaaattacgatttttaccattccgtgtctactggggccaggga

SEQ ID NO: 7860 - protein, 43 aa, Artificial Sequence
  Description of Artificial Sequence: Synthetic antibody
NLKQHPLSAVCLTMTNLKAKDKVMYYCECKLRFLPFRVYWGQG

SEQ ID NO: 7861 - DNA, 129 bp, Artificial Sequence
  Description of Artificial Sequence: Synthetic antibody
atctcaagcaacacccttttaagtgcagtctgccttacaatgaccaatctgaaagccaaggacaaggtcatgtattactgtgagtgcaaattacgatttttaccattccgtgtctactggggccaggga

SEQ ID NO: 7862 - protein, 43 aa, Artificial Sequence
  Description of Artificial Sequence: Synthetic antibody
ISSNTLLSAVCLTMTNLKAKDKVMYYCECKLRFLPFRVYWGQG

SEQ ID NO: 7863 - protein, 14 aa, Artificial Sequence
  Description of Artificial Sequence: Synthetic antibody
CARGMVRGANRDVW

SEQ ID NO: 7864 - DNA, 129 bp, Artificial Sequence
  Description of Artificial Sequence: Synthetic antibody
atgaccaggaacacctccataagcacagcctacatggagctgagcagcctgagatctgaggacacggccgtgtattactgtgcgagaggtatggttcggggagctaatagggacgtctggggccaaggg

SEQ ID NO: 7865 - protein, 43 aa, Artificial Sequence
  Description of Artificial Sequence: Synthetic antibody
MTRNTSISTAYMELSSLRSEDTAVYYCARGMVRGANRDVWGQG

SEQ ID NO: 7866 - DNA, 129 bp, Artificial Sequence
  Description of Artificial Sequence: Synthetic antibody
atgaccagcaacacctccataagcacagcctacatggagctgagcagcctgagatctgaggacacggccgtgtattactgtgcgagaggtatggttcggggagctaatagggacgtctggggccaaggg

SEQ ID NO: 7867 - protein, 43 aa, Artificial Sequence
  Description of Artificial Sequence: Synthetic antibody
MTSNTSISTAYMELSSLRSEDTAVYYCARGMVRGANRDVWGQG

SEQ ID NO: 7868 - protein, 14 aa, Artificial Sequence
  Description of Artificial Sequence: Synthetic antibody
CATNRLRDWSSDYW

SEQ ID NO: 7869 - DNA, 129 bp, Artificial Sequence
  Description of Artificial Sequence: Synthetic antibody
tactccagagataattccgagaacacggtgtctctgcaaatgaacagcctgagagccgaggacacggccgtttattactgtgcgacaaataggctgagagattggtcatctgactactggggccaggga

SEQ ID NO: 7870 - protein, 43 aa, Artificial Sequence
  Description of Artificial Sequence: Synthetic antibody
YSRDNSENTVSLQMNSLRAEDTAVYYCATNRLRDWSSDYWGQG

SEQ ID NO: 7871 - DNA, 129 bp, Artificial Sequence
  Description of Artificial Sequence: Synthetic antibody
acctccagagataattccgagaacacggtgtctctgcaaatgaacagcctgagagccgaggacacggccgtttattactgtgcgacaaataggctgagagattggtcatctgactactggggccaggga

SEQ ID NO: 7872 - protein, 43 aa, Artificial Sequence
  Description of Artificial Sequence: Synthetic antibody
TSRDNSENTVSLQMNSLRAEDTAVYYCATNRLRDWSSDYWGQG

SEQ ID NO: 7873 - protein, 18 aa, Artificial Sequence
  Description of Artificial Sequence: Synthetic antibody
CATARIYEPYYYYGMDVW

SEQ ID NO: 7874 - DNA, 129 bp, Artificial Sequence
  Description of Artificial Sequence: Synthetic antibody
acatctacagacacagcctacatggagctgagcagcctgagatctgaggacacggccgtgtattactgtgcaacagcaaggatctatgaaccctactactactacggtatggacgtctggggccaaggg

SEQ ID NO: 7875 - protein, 43 aa, Artificial Sequence
  Description of Artificial Sequence: Synthetic antibody
TSTDTAYMELSSLRSEDTAVYYCATARIYEPYYYYGMDVWGQG

SEQ ID NO: 7876 - DNA, 129 bp, Artificial Sequence
  Description of Artificial Sequence: Synthetic antibody
aaatctacagacacagcctacatggagctgagcagcctgagatctgaggacacggccgtgtattactgtgcaacagcaaggatctatgaaccctactactactacggtatggacgtctggggccaaggg

SEQ ID NO: 7877 - protein, 43 aa, Artificial Sequence
  Description of Artificial Sequence: Synthetic antibody
KSTDTAYMELSSLRSEDTAVYYCATARIYEPYYYYGMDVWGQG

SEQ ID NO: 7878 - protein, 21 aa, Artificial Sequence
  Description of Artificial Sequence: Synthetic antibody
CARDHVSGYSSGWYGCGIAYW

SEQ ID NO: 7879 - DNA, 129 bp, Artificial Sequence
  Description of Artificial Sequence: Synthetic antibody
aacacgctgtatctgcaaatgaacagtctgagagccgaggacacggctgtgtattactgtgcaagagaccacgtttccgggtatagcagtggctggtatgggtgtgggatagcctactggggccaggga

SEQ ID NO: 7880 - protein, 43 aa, Artificial Sequence
  Description of Artificial Sequence: Synthetic antibody
NTLYLQMNSLRAEDTAVYYCARDHVSGYSSGWYGCGIAYWGQG

SEQ ID NO: 7881 - DNA, 129 bp, Artificial Sequence
  Description of Artificial Sequence: Synthetic antibody
gaacacgctgtatctgcaatgaacagtctgagagccgaggacacggctgtgtattactgtgcaagagaccacgtttccgggtatagcagtggctggtatgggtgtgggatagcctactggggccaggga

SEQ ID NO: 7882 - protein, 43 aa, Artificial Sequence
  Description of Artificial Sequence: Synthetic antibody
EHAVSAMNSLRAEDTAVYYCARDHVSGYSSGWYGCGIAYWGQG

SEQ ID NO: 7883 - protein, 14 aa, Artificial Sequence
  Description of Artificial Sequence: Synthetic antibody
CARAPGIAAAGVDW

SEQ ID NO: 7884 - DNA, 129 bp, Artificial Sequence
  Description of Artificial Sequence: Synthetic antibody
atctccagggacaacgccaagaactcactgtatctgcaaatgtacagcctgagagccgaggacacggccgtgtattactgtgcgagagccccgggtatagcggcagccggggtagactggggccaggga

SEQ ID NO: 7885 - protein, 43 aa, Artificial Sequence
  Description of Artificial Sequence: Synthetic antibody
ISRDNAKNSLYLQMYSLRAEDTAVYYCARAPGIAAAGVDWGQG

SEQ ID NO: 7886 - DNA, 129 bp, Artificial Sequence
  Description of Artificial Sequence: Synthetic antibody
atctccagggacaacgccaagaactcactgtatctgcaaatgaacagcctgagagccgaggacacggccgtgtattactgtgcgagagccccgggtatagcagcagccggggtagactggggccaggga

SEQ ID NO: 7887 - protein, 43 aa, Artificial Sequence
  Description of Artificial Sequence: Synthetic antibody
ISRDNAKNSLYLQMNSLRAEDTAVYYCARAPGIAAAGVDWGQG

SEQ ID NO: 7888 - protein, 21 aa, Artificial Sequence
  Description of Artificial Sequence: Synthetic antibody
CARGGIVGATIGYYYYGMDVW

SEQ ID NO: 7889 - DNA, 129 bp, Artificial Sequence
  Description of Artificial Sequence: Synthetic antibody
aaccagttctccctgaagctgagctctgtgaccgccgcggacacggctgtgtattactgtgcgagaggcgggatagtgggagctactatcggatactactactacggtatggacgtctggggccaaggg

SEQ ID NO: 7890 - protein, 43 aa, Artificial Sequence
  Description of Artificial Sequence: Synthetic antibody
NQFSLKLSSVTAADTAVYYCARGGIVGATIGYYYYGMDVWGQG

SEQ ID NO: 7891 - DNA, 129 bp, Artificial Sequence
  Description of Artificial Sequence: Synthetic antibody
aaccagtcctccctgaagctgagctctgtggccgccgcggacacggctgtgtattactgtgcgagaggcgggatagtgggagctactatcggatactactactacggtatggacgtctggggccaaggg

SEQ ID NO: 7892 - protein, 43 aa, Artificial Sequence
  Description of Artificial Sequence: Synthetic antibody
NQSSLKLSSVAAADTAVYYCARGGIVGATIGYYYYGMDVWGQG

SEQ ID NO: 7893 - protein, 20 aa, Artificial Sequence
  Description of Artificial Sequence: Synthetic antibody
CARRGDNSGNYYVSGWFDPW

SEQ ID NO: 7894 - DNA, 129 bp, Artificial Sequence
  Description of Artificial Sequence: Synthetic antibody
aaggaccacttctccctgaagctgagctctgtgaccgccgcagacacggctgtttattactgtgcgagacgaggtgacaatagtggtaattactatgtctccgggtggttcgacccctggggccaggga

SEQ ID NO: 7895 - protein, 43 aa, Artificial Sequence
  Description of Artificial Sequence: Synthetic antibody
KDHFSLKLSSVTAADTAVYYCARRGDNSGNYYVSGWFDPWGQG

SEQ ID NO: 7896 - DNA, 129 bp, Artificial Sequence
  Description of Artificial Sequence: Synthetic antibody
aagaaccacttctccctgaagctgagctctgtgaccgccgcagacacggctgtttattactgtgcgagacgaggtgacaatagtggtaattactatgtctccgggtggttcgacccctggggccaggga

SEQ ID NO: 7897 - protein, 43 aa, Artificial Sequence
  Description of Artificial Sequence: Synthetic antibody
KNHFSLKLSSVTAADTAVYYCARRGDNSGNYYVSGWFDPWGQG

SEQ ID NO: 7898 - protein, 17 aa, Artificial Sequence
  Description of Artificial Sequence: Synthetic antibody
CATHSDGWYGKGYFDYW

SEQ ID NO: 7899 - DNA, 129 bp, Artificial Sequence
  Description of Artificial Sequence: Synthetic antibody
cacaactccaagaacacgttgtatcttcaaatgaatagcctgagaggcgaggacacggccgtgtattactgcgcgacccatagtgatggctggtacgggaagggctactttgactattggggccagggc

SEQ ID NO: 7900 - protein, 43 aa, Artificial Sequence
  Description of Artificial Sequence: Synthetic antibody
HNSKNTLYLQMNSLRGEDTAVYYCATHSDGWYGKGYFDYWGQG

SEQ ID NO: 7901 - DNA, 129 bp, Artificial Sequence
  Description of Artificial Sequence: Synthetic antibody
gacaactccaagaacacgttgtatcttcaaatgaatagcctgagaggcgaggacacggccgtgtattactgcgcgacccatagtgatggctggtacgggaagggctactttgactattggggccagggc

SEQ ID NO: 7902 - protein, 43 aa, Artificial Sequence
  Description of Artificial Sequence: Synthetic antibody
DNSKNTLYLQMNSLRGEDTAVYYCATHSDGWYGKGYFDYWGQG

SEQ ID NO: 7903 - protein, 17 aa, Artificial Sequence
  Description of Artificial Sequence: Synthetic antibody
CAKGGGYSSGYYYFDYW

SEQ ID NO: 7904 - DNA, 129 bp, Artificial Sequence
  Description of Artificial Sequence: Synthetic antibody
gataattccaagaacacgctgtatctgcaaatgaacagcctgagagccgaggacacggccgtatattactgtgcgaaaggggggggttatagtagtggttactactactttgactactggggccaggga

SEQ ID NO: 7905 - protein, 43 aa, Artificial Sequence
  Description of Artificial Sequence: Synthetic antibody
DNSKNTLYLQMNSLRAEDTAVYYCAKGGGYSSGYYYFDYWGQG

SEQ ID NO: 7906 - DNA, 129 bp, Artificial Sequence
  Description of Artificial Sequence: Synthetic antibody
gataattccaacaacacgctgtatctgcaaatgaacagcctgagagccgaggacacggccgtatattactgtgcgaaaggggggggttatagtagtggttactactactttgactactggggccaggga

SEQ ID NO: 7907 - protein, 43 aa, Artificial Sequence
  Description of Artificial Sequence: Synthetic antibody
DNSNNTLYLQMNSLRAEDTAVYYCAKGGGYSSGYYYFDYWGQG

SEQ ID NO: 7908 - protein, 14 aa, Artificial Sequence
  Description of Artificial Sequence: Synthetic antibody
CASSLDGTGDFDYW

SEQ ID NO: 7909 - DNA, 129 bp, Artificial Sequence
  Description of Artificial Sequence: Synthetic antibody
atgaccaggaacacctccataagcacagcctacatggagctgagcagcctgagatctgaggacacggccgtgtattactgtgcgagctctctggacggaacgggagactttgactactggggccaggga

SEQ ID NO: 7910 - protein, 43 aa, Artificial Sequence
  Description of Artificial Sequence: Synthetic antibody
MTRNTSISTAYMELSSLRSEDTAVYYCASSLDGTGDFDYWGQG

SEQ ID NO: 7911 - DNA, 129 bp, Artificial Sequence
  Description of Artificial Sequence: Synthetic antibody
atgaccagcaacacctccataagcacagcctacatggagctgagcagcctgagatctgaggacacggccgtgtattactgtgcgagctctctggacggaacgggagactttgactactggggccaggga

SEQ ID NO: 7912 - protein, 43 aa, Artificial Sequence
  Description of Artificial Sequence: Synthetic antibody
MTSNTSISTAYMELSSLRSEDTAVYYCASSLDGTGDFDYWGQG

SEQ ID NO: 7913 - protein, 12 aa, Artificial Sequence
  Description of Artificial Sequence: Synthetic antibody
CARDYGDYPGDW

SEQ ID NO: 7914 - DNA, 129 bp, Artificial Sequence
  Description of Artificial Sequence: Synthetic antibody
gtcaccatgaccagggacacgtccatcagcacagcctacatggagctgagcaggctgagatctgacgacacggccgtgtattactgtgcgagagactacggtgactacccaggggactggggccaggga

SEQ ID NO: 7915 - protein, 43 aa, Artificial Sequence
  Description of Artificial Sequence: Synthetic antibody
VTMTRDTSISTAYMELSRLRSDDTAVYYCARDYGDYPGDWGQG

SEQ ID NO: 7916 - DNA, 129 bp, Artificial Sequence
  Description of Artificial Sequence: Synthetic antibody
ggcaccatgacctgggacacgtccatcagcacagcctacatggagctgagcaggctgagatctgacgacacggccgtgtattactgtgcgagagactacggtgactacccaggggactggggccaggga

SEQ ID NO: 7917 - protein, 43 aa, Artificial Sequence
  Description of Artificial Sequence: Synthetic antibody
GTMTWDTSISTAYMELSRLRSDDTAVYYCARDYGDYPGDWGQG

SEQ ID NO: 7918 - protein, 16 aa, Artificial Sequence
  Description of Artificial Sequence: Synthetic antibody
CAHSIIIPVSHWFDPW

SEQ ID NO: 7919 - DNA, 129 bp, Artificial Sequence
  Description of Artificial Sequence: Synthetic antibody
caaggacacctccaaaaccaggtggtccttacaatgaccaacatggaccctgtggacacagccacatattactgtgcacacagtataataataccggtttcacactggttcgacccctggggccaggga

SEQ ID NO: 7920 - protein, 43 aa, Artificial Sequence
  Description of Artificial Sequence: Synthetic antibody
QGHLQNQVVLTMTNMDPVDTATYYCAHSIIIPVSHWFDPWGQG

SEQ ID NO: 7921 - DNA, 129 bp, Artificial Sequence
  Description of Artificial Sequence: Synthetic antibody
aaggacacctccaaaaaccaggtggtccttacaatgaccaacatggaccctgtggacacagccacatattactgtgcacacagtataataataccggtttcacactggttcgacccctggggccaggga

SEQ ID NO: 7922 - protein, 43 aa, Artificial Sequence
  Description of Artificial Sequence: Synthetic antibody
KDTSKNQVVLTMTNMDPVDTATYYCAHSIIIPVSHWFDPWGQG

SEQ ID NO: 7923 - protein, 18 aa, Artificial Sequence
  Description of Artificial Sequence: Synthetic antibody
CASAHSGYEDPRHAFDIW

SEQ ID NO: 7924 - DNA, 129 bp, Artificial Sequence
  Description of Artificial Sequence: Synthetic antibody
acatccacgagcacagcctacatggagctgaggagcctgagatctgacgacacggccgtgtattactgtgcgagcgctcatagtggctacgaagaccctagacatgcttttgatatctggggccaaggg

SEQ ID NO: 7925 - protein, 43 aa, Artificial Sequence
  Description of Artificial Sequence: Synthetic antibody
TSTSTAYMELRSLRSDDTAVYYCASAHSGYEDPRHAFDIWGQG

SEQ ID NO: 7926 - DNA, 129 bp, Artificial Sequence
  Description of Artificial Sequence: Synthetic antibody
acatccacgagcacagcctacatggagcggaggagcctgagatctgacgacacggccgtgtattactgtgcgagcgctcatagtggctacgaagaccctagacatgcttttgatatctggggccaaggg

SEQ ID NO: 7927 - protein, 43 aa, Artificial Sequence
  Description of Artificial Sequence: Synthetic antibody
TSTSTAYMERRSLRSDDTAVYYCASAHSGYEDPRHAFDIWGQG

SEQ ID NO: 7928 - protein, 16 aa, Artificial Sequence
  Description of Artificial Sequence: Synthetic antibody
CAKDMGSGSYDAFDIW

SEQ ID NO: 7929 - DNA, 129 bp, Artificial Sequence
  Description of Artificial Sequence: Synthetic antibody
atatataattccaagaacacgctgtatctgcaaatgaacagcctgagagccgaggacacggccgtatattactgtgcgaaagatatgggttcggggagttatgacgcttttgatatctggggccaaggg

SEQ ID NO: 7930 - protein, 43 aa, Artificial Sequence
  Description of Artificial Sequence: Synthetic antibody
IYNSKNTLYLQMNSLRAEDTAVYYCAKDMGSGSYDAFDIWGQG

SEQ ID NO: 7931 - DNA, 129 bp, Artificial Sequence
  Description of Artificial Sequence: Synthetic antibody
agagataattccaagaacacgctgtatctgcaaatgaacagcctgagagccgaggacacggccgtatattactgtgcgaaagatatgggttcggggagttatgacgcttttgatatctggggccaaggg

SEQ ID NO: 7932 - protein, 43 aa, Artificial Sequence
  Description of Artificial Sequence: Synthetic antibody
RDNSKNTLYLQMNSLRAEDTAVYYCAKDMGSGSYDAFDIWGQG

SEQ ID NO: 7933 - protein, 18 aa, Artificial Sequence
  Description of Artificial Sequence: Synthetic antibody
CTTDANYVWWELLQFDYW

SEQ ID NO: 7934 - DNA, 129 bp, Artificial Sequence
  Description of Artificial Sequence: Synthetic antibody
gattcaaaaaacacgctgtatctgcaaatgaacagcctgaaaaccgaggacacagccgtgtattactgtaccacagatgccaattacgtctggtgggagctactacagtttgactactggggccaggga

SEQ ID NO: 7935 - protein, 43 aa, Artificial Sequence
  Description of Artificial Sequence: Synthetic antibody
DSKNTLYLQMNSLKTEDTAVYYCTTDANYVWWELLQFDYWGQG

SEQ ID NO: 7936 - DNA, 129 bp, Artificial Sequence
  Description of Artificial Sequence: Synthetic antibody
gattcaaaaaacacgctgtatctgcaaatgaacagcctgaaaaccgaggacacagccgtgtactactgtaccacagatgccaattacgtctggtgggagctactgcagtttgactactggggccaggga

SEQ ID NO: 7937 - protein, 19 aa, Artificial Sequence
  Description of Artificial Sequence: Synthetic antibody
CARRLEYSSSWQYNWFDPW

SEQ ID NO: 7938 - DNA, 129 bp, Artificial Sequence
  Description of Artificial Sequence: Synthetic antibody
tccatcagcaccgcctacctgcagtggagcagcctgaaggcctcggacaccgccatgtattactgtgcgagacgcctcgagtatagcagcagctggcagtacaactggttcgacccctggggccaggga

SEQ ID NO: 7939 - protein, 43 aa, Artificial Sequence
  Description of Artificial Sequence: Synthetic antibody
SISTAYLQWSSLKASDTAMYYCARRLEYSSSWQYNWFDPWGQG

SEQ ID NO: 7940 - DNA, 129 bp, Artificial Sequence
  Description of Artificial Sequence: Synthetic antibody
tccatcggcaccgcctacctgcagtggagcagcctgaaggcctcggacaccgccatgtattactgtgcgagacgcctcgagtatagcagcagctggcagtacaactggttcgacccctggggccaggga

SEQ ID NO: 7941 - protein, 43 aa, Artificial Sequence
  Description of Artificial Sequence: Synthetic antibody
SIGTAYLQWSSLKASDTAMYYCARRLEYSSSWQYNWFDPWGQG

SEQ ID NO: 7942 - protein, 16 aa, Artificial Sequence
  Description of Artificial Sequence: Synthetic antibody
CARDHDDYGLGGVGYW

SEQ ID NO: 7943 - DNA, 129 bp, Artificial Sequence
  Description of Artificial Sequence: Synthetic antibody
tgggacacctccatcaccactgcctacatggagttgagcaggctgaaatctgacgacacggccgtgtattactgtgcgagagaccacgatgactacggactcgggggcgtgggctattggggccagggc

SEQ ID NO: 7944 - protein, 43 aa, Artificial Sequence
  Description of Artificial Sequence: Synthetic antibody
WDTSITTAYMELSRLKSDDTAVYYCARDHDDYGLGGVGYWGQG

SEQ ID NO: 7945 - DNA, 129 bp, Artificial Sequence
  Description of Artificial Sequence: Synthetic antibody
agggacacctccatcaccacagcctacatggagttgagcaggctgaaatctgacgacacggccgtgtattactgtgcgagagaccacgatgactacggactcgggggcgtgggctattggggccagggc

SEQ ID NO: 7946 - protein, 43 aa, Artificial Sequence
  Description of Artificial Sequence: Synthetic antibody
RDTSITTAYMELSRLKSDDTAVYYCARDHDDYGLGGVGYWGQG

SEQ ID NO: 7947 - protein, 22 aa, Artificial Sequence
  Description of Artificial Sequence: Synthetic antibody
CARDGEYYYGSGSYYTDAFDIW

SEQ ID NO: 7948 - DNA, 129 bp, Artificial Sequence
  Description of Artificial Sequence: Synthetic antibody
acagcctacttggagctgagcagcctgagatctgaggacacggccgtgtattactgtgcgagagatggggagtattactatggttcagggagttattatactgatgcttttgatatctggggccaaggg

SEQ ID NO: 7949 - protein, 43 aa, Artificial Sequence
  Description of Artificial Sequence: Synthetic antibody
TAYLELSSLRSEDTAVYYCARDGEYYYGSGSYYTDAFDIWGQG

SEQ ID NO: 7950 - DNA, 129 bp, Artificial Sequence
  Description of Artificial Sequence: Synthetic antibody
acagcctacatggagctgagcagcctgagatctgaggacacggccgtgtattactgtgcgagagatggggagtattactatggttcagggagttattatactgatgcttttgatatctggggccaaggg

SEQ ID NO: 7951 - protein, 43 aa, Artificial Sequence
  Description of Artificial Sequence: Synthetic antibody
TAYMELSSLRSEDTAVYYCARDGEYYYGSGSYYTDAFDIWGQG

SEQ ID NO: 7952 - protein, 16 aa, Artificial Sequence
  Description of Artificial Sequence: Synthetic antibody
CAKEVRLRPYNWFDPW

SEQ ID NO: 7953 - DNA, 129 bp, Artificial Sequence
  Description of Artificial Sequence: Synthetic antibody
ttagacaattccaagaacacgctgtatctgcaaatgaacagcctgagagccgaggacacggccgtatattactgtgcgaaagaggtccgactccgaccttacaactggttcgacccctggggccaggga

SEQ ID NO: 7954 - protein, 43 aa, Artificial Sequence
  Description of Artificial Sequence: Synthetic antibody
LDNSKNTLYLQMNSLRAEDTAVYYCAKEVRLRPYNWFDPWGQG

SEQ ID NO: 7955 - DNA, 129 bp, Artificial Sequence
  Description of Artificial Sequence: Synthetic antibody
agagacaattccaagaacacgctgtatctgcaaatgaacagcctgagagccgaggacacggccgtatattactgtgcgaaagaggtccgactccgaccttacaactggttcgacccctggggccaggga

SEQ ID NO: 7956 - protein, 43 aa, Artificial Sequence
  Description of Artificial Sequence: Synthetic antibody
RDNSKNTLYLQMNSLRAEDTAVYYCAKEVRLRPYNWFDPWGQG

SEQ ID NO: 7957 - protein, 17 aa, Artificial Sequence
  Description of Artificial Sequence: Synthetic antibody
CAREFFDILTGYYLDYW

SEQ ID NO: 7958 - DNA, 129 bp, Artificial Sequence
  Description of Artificial Sequence: Synthetic antibody
gacacctccaaaagccaggtggtccttaccatgaccaacatggaccctgtggacacagccacatatttctgtgcacgggagtttttcgatattttgactggttattatctcgactactggggccaggga

SEQ ID NO: 7959 - protein, 43 aa, Artificial Sequence
  Description of Artificial Sequence: Synthetic antibody
DTSKSQVVLTMTNMDPVDTATYFCAREFFDILTGYYLDYWGQG

SEQ ID NO: 7960 - DNA, 129 bp, Artificial Sequence
  Description of Artificial Sequence: Synthetic antibody
gacacctccaaaagccaggcggtccttaccatgaccaacatggaccctgtggacacagccacatatttctgtgcacgggagtttttcgatattttgactggttattatctcgactactggggccgggga

SEQ ID NO: 7961 - protein, 43 aa, Artificial Sequence
  Description of Artificial Sequence: Synthetic antibody
DTSKSQAVLTMTNMDPVDTATYFCAREFFDILTGYYLDYWGRG

SEQ ID NO: 7962 - protein, 17 aa, Artificial Sequence
  Description of Artificial Sequence: Synthetic antibody
CAKDSGDYGGDPPFDYW

SEQ ID NO: 7963 - DNA, 129 bp, Artificial Sequence
  Description of Artificial Sequence: Synthetic antibody
tataattccaacaacacgctgtatctgcaaatgaacagcctgagagccgaggacacggccgtatattactgtgcgaaagattcgggggactacggtggcgatcccccctttgactactggggccaggga

SEQ ID NO: 7964 - protein, 43 aa, Artificial Sequence
  Description of Artificial Sequence: Synthetic antibody
YNSNNTLYLQMNSLRAEDTAVYYCAKDSGDYGGDPPFDYWGQG

SEQ ID NO: 7965 - DNA, 129 bp, Artificial Sequence
  Description of Artificial Sequence: Synthetic antibody
gataattccaagaacacgctgtatctgcaaatgaacagcctgagagccgaggacacggccgtatattactgtgcgaaagattcgggggactacggtggcgatcccccctttgactactggggccaggga

SEQ ID NO: 7966 - protein, 43 aa, Artificial Sequence
  Description of Artificial Sequence: Synthetic antibody
DNSKNTLYLQMNSLRAEDTAVYYCAKDSGDYGGDPPFDYWGQG

SEQ ID NO: 7967 - protein, 16 aa, Artificial Sequence
  Description of Artificial Sequence: Synthetic antibody
CARGDDTSSWYYFDYW

SEQ ID NO: 7968 - DNA, 129 bp, Artificial Sequence
  Description of Artificial Sequence: Synthetic antibody
gtagacacgtctatgaagctgttctccctgaagctgagctctgtgactgccgcggacacggccgtgtattactgtgcgagaggggacgataccagcagctggtactactttgactactggggccaggga

SEQ ID NO: 7969 - protein, 43 aa, Artificial Sequence
  Description of Artificial Sequence: Synthetic antibody
VDTSMKLFSLKLSSVTAADTAVYYCARGDDTSSWYYFDYWGQG

SEQ ID NO: 7970 - DNA, 129 bp, Artificial Sequence
  Description of Artificial Sequence: Synthetic antibody
gtagacacgtctaagaagcagttctccctgaagctgagctctgtgactgccgcggacacggccgtgtattactgtgcgagaggggacgataccagcagctggtactactttgactactggggccaggga

SEQ ID NO: 7971 - protein, 43 aa, Artificial Sequence
  Description of Artificial Sequence: Synthetic antibody
VDTSKKQFSLKLSSVTAADTAVYYCARGDDTSSWYYFDYWGQG

SEQ ID NO: 7972 - protein, 14 aa, Artificial Sequence
  Description of Artificial Sequence: Synthetic antibody
CATASRYSPPGLLW

SEQ ID NO: 7973 - DNA, 129 bp, Artificial Sequence
  Description of Artificial Sequence: Synthetic antibody
atgaccacagatctgtccacgagcacagcctacatggaactgaggaacctgagatcagacgacacggccttatattattgtgcgacggcatcgagatattcgccacctgggctcctctggggccaggga

SEQ ID NO: 7974 - protein, 43 aa, Artificial Sequence
  Description of Artificial Sequence: Synthetic antibody
MTTDLSTSTAYMELRNLRSDDTALYYCATASRYSPPGLLWGQG

SEQ ID NO: 7975 - DNA, 129 bp, Artificial Sequence
  Description of Artificial Sequence: Synthetic antibody
atgaccacagatctgcccacgagcacagcctacatggaactgaggaacctgagatcagacgacacggccttatattattgtgcgacggcatcgagatattcgccacctgggctcctctggggccaggga

SEQ ID NO: 7976 - protein, 43 aa, Artificial Sequence
  Description of Artificial Sequence: Synthetic antibody
MTTDLPTSTAYMELRNLRSDDTALYYCATASRYSPPGLLWGQG

SEQ ID NO: 7977 - protein, 11 aa, Artificial Sequence [sequence omitted]

SEQ ID NO: 7978 - DNA, 129 bp, Artificial Sequence
  Description of Artificial Sequence: Synthetic antibody
cgagtcaccatatcagtagacacgtccaagaaccagttctccctgaagctgagctctgtgaccgccgcggacacggctgtgtattactgtgcgagagggcgtcgatattttgactactggggccaggga

SEQ ID NO: 7979 - protein, 43 aa, Artificial Sequence
  Description of Artificial Sequence: Synthetic antibody
RVTISVDTSKNQFSLKLSSVTAADTAVYYCARGRRYFDYWGQG

SEQ ID NO: 7980 - DNA, 129 bp, Artificial Sequence
  Description of Artificial Sequence: Synthetic antibody
cgagtcaccatatcagtagacacgtccaagaaccagctctccctgaagctgagctctgtgaccgccgcggacacggctgcgtattactgtgcgagggggcgtcgatattttgactactggggccagggg

SEQ ID NO: 7981 - protein, 43 aa, Artificial Sequence
  Description of Artificial Sequence: Synthetic antibody
RVTISVDTSKNQLSLKLSSVTAADTAAYYCARGRRYFDYWGQG

SEQ ID NO: 7982 - protein, 28 aa, Artificial Sequence
  Description of Artificial Sequence: Synthetic antibody
CARGAYYGSGSSSSPPQDYYYYYGMDVW

SEQ ID NO: 7983 - DNA, 129 bp, Artificial Sequence
  Description of Artificial Sequence: Synthetic antibody
tgcagcctgatatctgaggacacggccgtgtattactgtgcgcgaggggcctactatggttcagggagttcgtcgtcgccaccccaagattactactactactacggtatggacgtctggggccaaggg

SEQ ID NO: 7984 - protein, 43 aa, Artificial Sequence
  Description of Artificial Sequence: Synthetic antibody
CSLISEDTAVYYCARGAYYGSGSSSSPPQDYYYYYGMDVWGQG

SEQ ID NO: 7985 - DNA, 129 bp, Artificial Sequence
  Description of Artificial Sequence: Synthetic antibody
agcagcctgagatctgaggacacggccgtgtattactgtgcgcgaggggcctactatggttcagggagttcgtcgtcgccaccccaagattactactactactacggtatggacgtctggggccaaggg

SEQ ID NO: 7986 - protein, 43 aa, Artificial Sequence
  Description of Artificial Sequence: Synthetic antibody
SSLRSEDTAVYYCARGAYYGSGSSSSPPQDYYYYYGMDVWGQG

SEQ ID NO: 7987 - protein, 15 aa, Artificial Sequence
  Description of Artificial Sequence: Synthetic antibody
CAKGLWFGGGGFDPW

SEQ ID NO: 7988 - DNA, 129 bp, Artificial Sequence
  Description of Artificial Sequence: Synthetic antibody
tccagagataattccaagaccacgctgtatctgcaaatgaacagcctgagagccgaggacacggccgtatattactgtgcgaaaggactatggttcggggggggcgggttcgacccctggggccaggga

SEQ ID NO: 7989 - protein, 43 aa, Artificial Sequence
  Description of Artificial Sequence: Synthetic antibody
SRDNSKTTLYLQMNSLRAEDTAVYYCAKGLWFGGGGFDPWGQG

SEQ ID NO: 7990 - DNA, 129 bp, Artificial Sequence
  Description of Artificial Sequence: Synthetic antibody
tccagagataattccaacaacacgctgtatctgcaaatgaacagcctgagagccgaggacacggccgtatattactgtgcgaaaggactatggttcggggggggcgggttcgacccctggggccaggga

SEQ ID NO: 7991 - protein, 43 aa, Artificial Sequence
  Description of Artificial Sequence: Synthetic antibody
SRDNSNNTLYLQMNSLRAEDTAVYYCAKGLWFGGGGFDPWGQG

SEQ ID NO: 7992 - protein, 16 aa, Artificial Sequence
  Description of Artificial Sequence: Synthetic antibody
CAKDRPVRGEGAFDIW

SEQ ID NO: 7993 - DNA, 129 bp, Artificial Sequence
  Description of Artificial Sequence: Synthetic antibody
atagataattccaagaacacgctgtatctgcaaatgaacagcctgagagccgaggacacggccgtatattactgtgcgaaagatcgtccggttcggggggaaggggcttttgatatctggggccaaggg

SEQ ID NO: 7994 - protein, 43 aa, Artificial Sequence
  Description of Artificial Sequence: Synthetic antibody
IDNSKNTLYLQMNSLRAEDTAVYYCAKDRPVRGEGAFDIWGQG

SEQ ID NO: 7995 - DNA, 129 bp, Artificial Sequence
  Description of Artificial Sequence: Synthetic antibody
agagataattccaagaacacgctgtatctgcaaatgaacagcctgagagccgaggacacggccgtatattactgtgcgaaagatcgtccggttcggggggaaggggcttttgatatctggggccaaggg

SEQ ID NO: 7996 - protein, 43 aa, Artificial Sequence
  Description of Artificial Sequence: Synthetic antibody
RDNSKNTLYLQMNSLRAEDTAVYYCAKDRPVRGEGAFDIWGQG

SEQ ID NO: 7997 - protein, 13 aa, Artificial Sequence
  Description of Artificial Sequence: Synthetic antibody
CAHTEGVYGLDVW

SEQ ID NO: 7998 - DNA, 129 bp, Artificial Sequence
  Description of Artificial Sequence: Synthetic antibody
atcatcaccaaggacacctccaaaaaccaggtggtcctgacaatgaccaacatggcccctgtggacacagccacatattactgtgcacacacggagggggtttacggtttggacgtctggggccaaggg

SEQ ID NO: 7999 - protein, 43 aa, Artificial Sequence
  Description of Artificial Sequence: Synthetic antibody
IITKDTSKNQVVLTMTNMAPVDTATYYCAHTEGVYGLDVWGQG

SEQ ID NO: 8000 - DNA, 129 bp, Artificial Sequence
  Description of Artificial Sequence: Synthetic antibody
accatcaccaaggacacctccaaaaaccaggtggtcctgacaatgaccaacatggcccctgtggacacagccacatattactgtgcacacacggagggggtttacggtttggacgtctggggccaaggg

SEQ ID NO: 8001 - protein, 43 aa, Artificial Sequence
  Description of Artificial Sequence: Synthetic antibody
TITKDTSKNQVVLTMTNMAPVDTATYYCAHTEGVYGLDVWGQG

SEQ ID NO: 8002 - protein, 18 aa, Artificial Sequence
  Description of Artificial Sequence: Synthetic antibody
CARRTHVQGSDYYGMDVW

SEQ ID NO: 8003 - DNA, 129 bp, Artificial Sequence
  Description of Artificial Sequence: Synthetic antibody
acgtccaagaaccagttctccctgaagctgagctctgtgaccgccgcagacacggctgtgtattactgtgcgagacgtacccatgttcagggatcggactactacggtatggacgtctggggccaaggg

SEQ ID NO: 8004 - protein, 43 aa, Artificial Sequence
  Description of Artificial Sequence: Synthetic antibody
TSKNQFSLKLSSVTAADTAVYYCARRTHVQGSDYYGMDVWGQG

SEQ ID NO: 8005 - DNA, 129 bp, Artificial Sequence
  Description of Artificial Sequence: Synthetic antibody
acgtccaagaaccagttctccctgaagctgagctctgtgaccgccgcagacacggctgtgtattactgtgcgagacgcacccatgttcagggatcggactactacggtatggacgtctggggccaaggg

SEQ ID NO: 8006 - protein, 17 aa, Artificial Sequence
  Description of Artificial Sequence: Synthetic antibody
CARAAIWFGELSYFDYW

SEQ ID NO: 8007 - DNA, 129 bp, Artificial Sequence
  Description of Artificial Sequence: Synthetic antibody
gacaattccaagaacacgctgtatcttcaaatgaacagcctgagagccgaggacacggccgtgtattactgtgcgagagccgctatatggttcggggagttatcttactttgactactggggccaggga

SEQ ID NO: 8008 - protein, 43 aa, Artificial Sequence
  Description of Artificial Sequence: Synthetic antibody
DNSKNTLYLQMNSLRAEDTAVYYCARAAIWFGELSYFDYWGQG

SEQ ID NO: 8009 - DNA, 129 bp, Artificial Sequence
  Description of Artificial Sequence: Synthetic antibody
gacaattccaagaacacgctgtatcttcaaatgaacagcccgagagccgaggacacggccgtgtattactgtgcgagagccgctatatggttcggggagttatcttactttgactactggggccaggga

SEQ ID NO: 8010 - protein, 43 aa, Artificial Sequence
  Description of Artificial Sequence: Synthetic antibody
DNSKNTLYLQMNSPRAEDTAVYYCARAAIWFGELSYFDYWGQG

SEQ ID NO: 8011 - protein, 18 aa, Artificial Sequence
  Description of Artificial Sequence: Synthetic antibody
CTRQGDSSGWYDGWFDPW

SEQ ID NO: 8012 - DNA, 129 bp, Artificial Sequence
  Description of Artificial Sequence: Synthetic antibody
gattcaaagaacacggcgtatctgcaaatgaatagcctgaaaaccgaggacacggccgtgtattactgtactagacagggggatagcagtggctggtacgatggctggttcgacccctggggccaggga

SEQ ID NO: 8013 - protein, 43 aa, Artificial Sequence
  Description of Artificial Sequence: Synthetic antibody
DSKNTAYLQMNSLKTEDTAVYYCTRQGDSSGWYDGWFDPWGQG

SEQ ID NO: 8014 - DNA, 129 bp, Artificial Sequence
  Description of Artificial Sequence: Synthetic antibody
gattcaaagaacacggcgtatctgcaaatgaacagcctgaaaaccgaggacacggccgtgtattactgtactagacagggggatagcagtggctggtacgatggctggttcgacccctggggccaggga

SEQ ID NO: 8015 - protein, 19 aa, Artificial Sequence
  Description of Artificial Sequence: Synthetic antibody
CARGEGYSYGASGGPFDYW

SEQ ID NO: 8016 - DNA, 129 bp, Artificial Sequence
  Description of Artificial Sequence: Synthetic antibody
tccataagcacagcctacatggagctgagcagcctgagatttgaggacacggccgtgtattactgtgcgagaggcgagggatacagctatggtgcctccgggggcccctttgactactggggccaggga

SEQ ID NO: 8017 - protein, 43 aa, Artificial Sequence
  Description of Artificial Sequence: Synthetic antibody
SISTAYMELSSLRFEDTAVYYCARGEGYSYGASGGPFDYWGQG

SEQ ID NO: 8018 - DNA, 129 bp, Artificial Sequence
  Description of Artificial Sequence: Synthetic antibody
tccataagcacagcctacatggagctgagcagcctgagatctgaggacacggccgtgtattactgtgcgagaggcgagggatacagctatggtgcctccgggggcccctttgactactggggccaggga

SEQ ID NO: 8019 - protein, 43 aa, Artificial Sequence
  Description of Artificial Sequence: Synthetic antibody
SISTAYMELSSLRSEDTAVYYCARGEGYSYGASGGPFDYWGQG

SEQ ID NO: 8020 - protein, 16 aa, Artificial Sequence
  Description of Artificial Sequence: Synthetic antibody
CAKDHYGDYPLLFDYW

SEQ ID NO: 8021 - DNA, 129 bp, Artificial Sequence
  Description of Artificial Sequence: Synthetic antibody
agagacaattccaagaacacgctgtatctgcaaatgaacagcctgagagccgaggacacggccgtatattactgtgcgaaagatcactacggtgactaccctcttctctttgactactggggccaggga

SEQ ID NO: 8022 - protein, 43 aa, Artificial Sequence
  Description of Artificial Sequence: Synthetic antibody
RDNSKNTLYLQMNSLRAEDTAVYYCAKDHYGDYPLLFDYWGQG

SEQ ID NO: 8023 - DNA, 129 bp, Artificial Sequence
  Description of Artificial Sequence: Synthetic antibody
agagacaattccaagaacacgctgtatctgcaaatgaacagcctgagagccgaggacacggccgtatattactgcgcgaaagatcactacggtgactaccctcttctctttgactactggggccaggga

SEQ ID NO: 8024 - protein, 13 aa, Artificial Sequence
  Description of Artificial Sequence: Synthetic antibody
CARDLRRAAFDIW

SEQ ID NO: 8025 - DNA, 129 bp, Artificial Sequence
  Description of Artificial Sequence: Synthetic antibody
accatgacctgggacacgtccacgagcacagtctacatggagctgagcagcctgagatctgaggacacggccgtgtattactgtgcgagagatctacgccgggctgcttttgatatctggggccaaggg

SEQ ID NO: 8026 - protein, 43 aa, Artificial Sequence
  Description of Artificial Sequence: Synthetic antibody
TMTWDTSTSTVYMELSSLRSEDTAVYYCARDLRRAAFDIWGQG

SEQ ID NO: 8027 - DNA, 129 bp, Artificial Sequence
  Description of Artificial Sequence: Synthetic antibody
accatgaccagggacacgtccacgagcacagtctacatggagctgagcagcctgagatctgaggacacggccgtgtattactgtgcgagagatctacgccgggctgcttttgatatctggggccaaggg

SEQ ID NO: 8028 - protein, 43 aa, Artificial Sequence
  Description of Artificial Sequence: Synthetic antibody
TMTRDTSTSTVYMELSSLRSEDTAVYYCARDLRRAAFDIWGQG

SEQ ID NO: 8029 - protein, 14 aa, Artificial Sequence
  Description of Artificial Sequence: Synthetic antibody
CARTSRGSGYYYYW

SEQ ID NO: 8030 - DNA, 129 bp, Artificial Sequence
  Description of Artificial Sequence: Synthetic antibody
attaccgcggacaaatccacgagcacagcctacatggagctgagcagcctgagatctgaggacacggccgtgtattactgtgcgagaacctctcggggaagtggttattactactactggggccaggga

SEQ ID NO: 8031 - protein, 43 aa, Artificial Sequence
  Description of Artificial Sequence: Synthetic antibody
ITADKSTSTAYMELSSLRSEDTAVYYCARTSRGSGYYYYWGQG

SEQ ID NO: 8032 - DNA, 129 bp, Artificial Sequence
  Description of Artificial Sequence: Synthetic antibody
attaccgcggacaaatccacgagcacagcctacatggagctgagcagcctgagatctgaggacacggccatgtattactgtgcgagaacctctcggggaagtggttattactactactggggccaggga

SEQ ID NO: 8033 - protein, 43 aa, Artificial Sequence
  Description of Artificial Sequence: Synthetic antibody
ITADKSTSTAYMELSSLRSEDTAMYYCARTSRGSGYYYYWGQG

SEQ ID NO: 8034 - protein, 14 aa, Artificial Sequence
  Description of Artificial Sequence: Synthetic antibody
CARGRGSGSYLGYW

SEQ ID NO: 8035 - DNA, 129 bp, Artificial Sequence
  Description of Artificial Sequence: Synthetic antibody
ttatcagtagacacgcccaagaaccagttctccctgaagctgagctctgtgaccgccgcggacacggctgtgtattactgtgcgagaggcaggggttcggggagttatttgggctactggggccaggga

SEQ ID NO: 8036 - protein, 43 aa, Artificial Sequence
  Description of Artificial Sequence: Synthetic antibody
LSVDTPKNQFSLKLSSVTAADTAVYYCARGRGSGSYLGYWGQG

SEQ ID NO: 8037 - DNA, 129 bp, Artificial Sequence
  Description of Artificial Sequence: Synthetic antibody
atatcagtagacacgtccaagaaccagttctccctgaagctgagctctgtgaccgccgcggacacggctgtgtattactgtgcgagaggcaggggttcggggagttatttgggctactggggccaggga

SEQ ID NO: 8038 - protein, 43 aa, Artificial Sequence
  Description of Artificial Sequence: Synthetic antibody
ISVDTSKNQFSLKLSSVTAADTAVYYCARGRGSGSYLGYWGQG

SEQ ID NO: 8039 - protein, 19 aa, Artificial Sequence
  Description of Artificial Sequence: Synthetic antibody
CAHRPGIVGAITEYYFDYW

SEQ ID NO: 8040 - DNA, 129 bp, Artificial Sequence
  Description of Artificial Sequence: Synthetic antibody
tccaaaaaccaggtggtccttacaatgaccaacatggaccctgtggacacagccacatattactgtgcacacagacccggtatagtgggagctattaccgagtactactttgactactggggccaggga

SEQ ID NO: 8041 - protein, 43 aa, Artificial Sequence
  Description of Artificial Sequence: Synthetic antibody
SKNQVVLTMTNMDPVDTATYYCAHRPGIVGAITEYYFDYWGQG

SEQ ID NO: 8042 - DNA, 129 bp, Artificial Sequence
  Description of Artificial Sequence: Synthetic antibody
ctccaaaaccaggtggtccttacaatgaccaacatggaccctgtggacacagccacatattactgtgcacacagacccggtatagtgggagctattaccgagtactactttgactactggggccaggga

SEQ ID NO: 8043 - protein, 43 aa, Artificial Sequence
  Description of Artificial Sequence: Synthetic antibody
LQNQVVLTMTNMDPVDTATYYCAHRPGIVGAITEYYFDYWGQG

SEQ ID NO: 8044 - protein, 15 aa, Artificial Sequence
  Description of Artificial Sequence: Synthetic antibody
CARVWNGPYDAFDIW

SEQ ID NO: 8045 - DNA, 129 bp, Artificial Sequence
  Description of Artificial Sequence: Synthetic antibody
accagggacacgttcacgagcacagtctacatggagctgagcagcctgagatctgaggacacggccgtgtattactgtgcgagagtttggaacgggccctatgatgcttttgatatctggggccaaggg

SEQ ID NO: 8046 - protein, 43 aa, Artificial Sequence
  Description of Artificial Sequence: Synthetic antibody
TRDTFTSTVYMELSSLRSEDTAVYYCARVWNGPYDAFDIWGQG

SEQ ID NO: 8047 - DNA, 129 bp, Artificial Sequence
  Description of Artificial Sequence: Synthetic antibody
accagggacacgtccacgagcacagtctacatggagctgagcagcctgagatctgaggacacggccgtgtattactgtgcgagagtttggaacgggccctatgatgcttttgatatctggggccaaggg

SEQ ID NO: 8048 - protein, 43 aa, Artificial Sequence
  Description of Artificial Sequence: Synthetic antibody
TRDTSTSTVYMELSSLRSEDTAVYYCARVWNGPYDAFDIWGQG

SEQ ID NO: 8049 - protein, 13 aa, Artificial Sequence
  Description of Artificial Sequence: Synthetic antibody
CASFSGDGPFDYW

SEQ ID NO: 8050 - DNA, 129 bp, Artificial Sequence
  Description of Artificial Sequence: Synthetic antibody
accatctccagagacaattccaagaacacgctgtatcttcaaatgaacagcctgagggccgaggacacggccgtgtattactgtgcgagttttagtggggatggaccctttgactactggggccaggga

SEQ ID NO: 8051 - protein, 43 aa, Artificial Sequence
  Description of Artificial Sequence: Synthetic antibody
TISRDNSKNTLYLQMNSLRAEDTAVYYCASFSGDGPFDYWGQG

SEQ ID NO: 8052 - DNA, 129 bp, Artificial Sequence
  Description of Artificial Sequence: Synthetic antibody
accatctccagagacaattccaagaacacgctgtatcttcaaatgaacagcctgagagccgaggacacggccgtgtattactgtgcgagttttagtggggatggaccctttgactactggggccaggga

SEQ ID NO: 8053 - protein, 16 aa, Artificial Sequence
  Description of Artificial Sequence: Synthetic antibody
CARKDTTVTLMALDYW

SEQ ID NO: 8054 - DNA, 129 bp, Artificial Sequence
  Description of Artificial Sequence: Synthetic antibody
ttagacaatgccaagaactcactgtatctgcaaatgaacagcctgagagacgaggacacggctgtgtattactgtgcgaggaaagacactacggtgaccctaatggcccttgactactggggccaggga

SEQ ID NO: 8055 - protein, 43 aa, Artificial Sequence
  Description of Artificial Sequence: Synthetic antibody
LDNAKNSLYLQMNSLRDEDTAVYYCARKDTTVTLMALDYWGQG

SEQ ID NO: 8056 - DNA, 129 bp, Artificial Sequence
  Description of Artificial Sequence: Synthetic antibody
agagacaatgccaagaactcactgtatctgcaaatgaacagcctgagagacgaggacacggctgtgtattactgtgcgaggaaagacactacggtgaccctaatggcccttgactactggggccaggga

SEQ ID NO: 8057 - protein, 43 aa, Artificial Sequence
  Description of Artificial Sequence: Synthetic antibody
RDNAKNSLYLQMNSLRDEDTAVYYCARKDTTVTLMALDYWGQG

SEQ ID NO: 8058 - protein, 12 aa, Artificial Sequence [sequence omitted]

SEQ ID NO: 8059 - DNA, 129 bp, Artificial Sequence
  Description of Artificial Sequence: Synthetic antibody
ttcaccatctccagagacaacgccaggaacaccttatatctgcaaatgaacagtctgagagccgaggacacggctgtatattactgtggaagaggtagatactacggtatggacgtctggggccaaggg

SEQ ID NO: 8060 - protein, 43 aa, Artificial Sequence
  Description of Artificial Sequence: Synthetic antibody
FTISRDNARNTLYLQMNSLRAEDTAVYYCGRGRYYGMDVWGQG

SEQ ID NO: 8061 - DNA, 129 bp, Artificial Sequence
  Description of Artificial Sequence: Synthetic antibody
ttcaccatctccagagacaacgccaagaacatactgtttctgcaaatgaacagtctgagagccgaggacacggctgtatattactgtggaagaggtagatactacggtatggacgtctggggccaaggg

SEQ ID NO: 8062 - protein, 43 aa, Artificial Sequence
  Description of Artificial Sequence: Synthetic antibody
FTISRDNAKNILFLQMNSLRAEDTAVYYCGRGRYYGMDVWGQG

SEQ ID NO: 8063 - protein, 16 aa, Artificial Sequence
  Description of Artificial Sequence: Synthetic antibody
CAKFNGRIAAATIDYW

SEQ ID NO: 8064 - DNA, 129 bp, Artificial Sequence
  Description of Artificial Sequence: Synthetic antibody
ttagacaattccaagaacacgctgtatctgcaaatgaacagcctgagagccgaggacacggccgtatattactgtgcgaaattcaacgggcgtatagcagcagccacgattgactactggggccaggga

SEQ ID NO: 8065 - protein, 43 aa, Artificial Sequence
  Description of Artificial Sequence: Synthetic antibody
LDNSKNTLYLQMNSLRAEDTAVYYCAKFNGRIAAATIDYWGQG

SEQ ID NO: 8066 - DNA, 129 bp, Artificial Sequence
  Description of Artificial Sequence: Synthetic antibody
agagacaattccaagaacacgctgtatctgcaaatgaacagcctgagagccgaggacacggccgtatattactgtgcgaaattcaacgggcgtatagcagcagccacgattgactactggggccaggga

SEQ ID NO: 8067 - protein, 43 aa, Artificial Sequence
  Description of Artificial Sequence: Synthetic antibody
RDNSKNTLYLQMNSLRAEDTAVYYCAKFNGRIAAATIDYWGQG

SEQ ID NO: 8068 - protein, 18 aa, Artificial Sequence
  Description of Artificial Sequence: Synthetic antibody
CARGAGYCSSTSCHFDYW

SEQ ID NO: 8069 - DNA, 129 bp, Artificial Sequence
  Description of Artificial Sequence: Synthetic antibody
gcgtctaagaaccagttctccctgaagctgagctctgtgactgccgcggacatggccgtgtattactgtgcgagaggagcgggatattgtagtagtaccagctgccactttgactactggggccaggga

SEQ ID NO: 8070 - protein, 43 aa, Artificial Sequence
  Description of Artificial Sequence: Synthetic antibody
ASKNQFSLKLSSVTAADMAVYYCARGAGYCSSTSCHFDYWGQG

SEQ ID NO: 8071 - DNA, 129 bp, Artificial Sequence
  Description of Artificial Sequence: Synthetic antibody
acgtctaagaaccagttctccctgaagctgagctctgtgactgccgcggacacggccgtgtattactgtgcgagaggagcgggatattgtagtagtaccagctgccactttgactactggggccaggga

SEQ ID NO: 8072 - protein, 43 aa, Artificial Sequence
  Description of Artificial Sequence: Synthetic antibody
TSKNQFSLKLSSVTAADTAVYYCARGAGYCSSTSCHFDYWGQG

SEQ ID NO: 8073 - protein, 19 aa, Artificial Sequence
  Description of Artificial Sequence: Synthetic antibody
CAKDSWETSSGWSGTFDYW

SEQ ID NO: 8074 - DNA, 129 bp, Artificial Sequence
  Description of Artificial Sequence: Synthetic antibody
tccaagaacacgctgtatctgcaaatgaacagcctgagagccgaggacacggccgtatattactgtgcgaaagattcgtgggagactagcagtggctggtcaggaacgtttgactactggggccaggga

SEQ ID NO: 8075 - protein, 43 aa, Artificial Sequence
  Description of Artificial Sequence: Synthetic antibody
SKNTLYLQMNSLRAEDTAVYYCAKDSWETSSGWSGTFDYWGQG

SEQ ID NO: 8076 - DNA, 129 bp, Artificial Sequence
  Description of Artificial Sequence: Synthetic antibody
tccaagaacacgctgtacctgcaaatgaacagcctgagagccgaggacacggccgtatattactgtgcgaaagattcgtgggagactagcagtggctggtcaggaacgtttgactactggggccaggga

SEQ ID NO: 8077 - protein, 20 aa, Artificial Sequence
  Description of Artificial Sequence: Synthetic antibody
CAREDGDILTGYYYYGMDVW

SEQ ID NO: 8078 - DNA, 129 bp, Artificial Sequence
  Description of Artificial Sequence: Synthetic antibody
atgaactcactgtttctgcaaatgaacagcctgagagacgaggacacggctgtgtattactgtgcgagagaggatggggatattttgactggttattactactacggtatggacgtctggggccaaggg

SEQ ID NO: 8079 - protein, 43 aa, Artificial Sequence
  Description of Artificial Sequence: Synthetic antibody
MNSLFLQMNSLRDEDTAVYYCAREDGDILTGYYYYGMDVWGQG

SEQ ID NO: 8080 - DNA, 129 bp, Artificial Sequence
  Description of Artificial Sequence: Synthetic antibody
aagaactcactgtatctgcaaatgaacagcctgagagacgaggacacggctgtgtattactgtgcgagagaggatggggatattttgactggttattactactacggtatggacgtctggggccaaggg

SEQ ID NO: 8081 - protein, 43 aa, Artificial Sequence
  Description of Artificial Sequence: Synthetic antibody
KNSLYLQMNSLRDEDTAVYYCAREDGDILTGYYYYGMDVWGQG

SEQ ID NO: 8082 - protein, 18 aa, Artificial Sequence
  Description of Artificial Sequence: Synthetic antibody
CARDSGVSWYYYYGMDVW

SEQ ID NO: 8083 - DNA, 129 bp, Artificial Sequence
  Description of Artificial Sequence: Synthetic antibody
acctctgtcagcatggcatatctgcagatcagcagcctaaaggctgaggacactgccgtgtattactgtgcgagagattcgggagtttcgtggtactactactacggtatggacgtctggggccaaggg

SEQ ID NO: 8084 - protein, 43 aa, Artificial Sequence
  Description of Artificial Sequence: Synthetic antibody
TSVSMAYLQISSLKAEDTAVYYCARDSGVSWYYYYGMDVWGQG

SEQ ID NO: 8085 - DNA, 129 bp, Artificial Sequence
  Description of Artificial Sequence: Synthetic antibody
acctctgtcagcacggcatatctgcagatcagcagcctaaaggctgaggacactgccgtgtattactgtgcgagagattcgggagtttcgtggtactactactacggtatggacgtctggggccaaggg

SEQ ID NO: 8086 - protein, 43 aa, Artificial Sequence
  Description of Artificial Sequence: Synthetic antibody
TSVSTAYLQISSLKAEDTAVYYCARDSGVSWYYYYGMDVWGQG

SEQ ID NO: 8087 - protein, 10 aa, Artificial Sequence
  Description of Artificial Sequence: Synthetic antibody
CAREGTGDYW

SEQ ID NO: 8088 - DNA, 129 bp, Artificial Sequence
  Description of Artificial Sequence: Synthetic antibody
tgtcgagtcaccatatcagtagacacgtccaagaaccagttctccctgaagctgagctctgtgaccgccgcggacacggccgtgtattactgtgcgagagagggtacgggcgactactggggccaggga

SEQ ID NO: 8089 - protein, 43 aa, Artificial Sequence
  Description of Artificial Sequence: Synthetic antibody
CRVTISVDTSKNQFSLKLSSVTAADTAVYYCAREGTGDYWGQG

SEQ ID NO: 8090 - DNA, 129 bp, Artificial Sequence
  Description of Artificial Sequence: Synthetic antibody
agtcgagtcaccatatcagtagacacgtccaagaaccagttctccctgaagctgagctctgtgaccgccgcggacacggccgtgtattactgtgcgagagagggtacgggcgactactggggccaggga

SEQ ID NO: 8091 - protein, 43 aa, Artificial Sequence
  Description of Artificial Sequence: Synthetic antibody
SRVTISVDTSKNQFSLKLSSVTAADTAVYYCAREGTGDYWGQG

SEQ ID NO: 8092 - protein, 12 aa, Artificial Sequence
  Description of Artificial Sequence: Synthetic antibody
CARDRSGGLDYW

SEQ ID NO: 8093 - DNA, 129 bp, Artificial Sequence
  Description of Artificial Sequence: Synthetic antibody
gtcacgattaccgcggacaaatccacgagcacagcctacatggagctgagcagcctgagatctgaggacacggccgtgtattactgtgcgagagatcggagcggggggcttgactactggggccaggga

SEQ ID NO: 8094 - protein, 43 aa, Artificial Sequence
  Description of Artificial Sequence: Synthetic antibody
VTITADKSTSTAYMELSSLRSEDTAVYYCARDRSGGLDYWGQG

SEQ ID NO: 8095 - DNA, 129 bp, Artificial Sequence
  Description of Artificial Sequence: Synthetic antibody
gtcacgattaccgcgcacaaatccacgagcacagcctacatggagctgagcagcctgagatctgaggacacggccgtgtattactgtgcgagagatcggagcggggggcttgactactggggccaggga

SEQ ID NO: 8096 - protein, 43 aa, Artificial Sequence
  Description of Artificial Sequence: Synthetic antibody
VTITAHKSTSTAYMELSSLRSEDTAVYYCARDRSGGLDYWGQG

SEQ ID NO: 8097 - protein, 25 aa, Artificial Sequence
  Description of Artificial Sequence: Synthetic antibody
CARGRAIERGYSGYYYYYYYGMDVW

SEQ ID NO: 8098 - DNA, 129 bp, Artificial Sequence
  Description of Artificial Sequence: Synthetic antibody
ctgaagctgagctctgtggccgccgcggacacggctgtgtattactgtgcgagaggccgggcgattgaacgtggatatagtggctactattattactactactacggtatggacgtctggggccaaggg

SEQ ID NO: 8099 - protein, 43 aa, Artificial Sequence
  Description of Artificial Sequence: Synthetic antibody
LKLSSVAAADTAVYYCARGRAIERGYSGYYYYYYYGMDVWGQG

SEQ ID NO: 8100 - DNA, 129 bp, Artificial Sequence
  Description of Artificial Sequence: Synthetic antibody
ctgaagctgagctctgtgaccgccgcggacacggctgtgtattactgtgcgagaggccgggcgattgaacgtggatatagtggctactattattactactactacggtatggacgtctggggccaaggg

SEQ ID NO: 8101 - protein, 43 aa, Artificial Sequence
  Description of Artificial Sequence: Synthetic antibody
LKLSSVTAADTAVYYCARGRAIERGYSGYYYYYYYGMDVWGQG

SEQ ID NO: 8102 - protein, 13 aa, Artificial Sequence
  Description of Artificial Sequence: Synthetic antibody
CARDPNPWHPDYW

SEQ ID NO: 8103 - DNA, 129 bp, Artificial Sequence
  Description of Artificial Sequence: Synthetic antibody
accatctccagggacaacgccaagaactcactgtatctgcaaatgaacagcctgagagccgaggacacggccgtgtattactgtgcgagagatccgaacccgtggcacccagactactggggccaggga

SEQ ID NO: 8104 - protein, 43 aa, Artificial Sequence
  Description of Artificial Sequence: Synthetic antibody
TISRDNAKNSLYLQMNSLRAEDTAVYYCARDPNPWHPDYWGQG

SEQ ID NO: 8105 - DNA, 129 bp, Artificial Sequence
  Description of Artificial Sequence: Synthetic antibody
accatctccagggacaacgccaacaactcactgtatctgcaaatcaacagcctgagagccgaggacacggccgtgtattactgtgcgagagatccgaacccgtggcacccagactactggggccaggga

SEQ ID NO: 8106 - protein, 43 aa, Artificial Sequence
  Description of Artificial Sequence: Synthetic antibody
TISRDNANNSLYLQINSLRAEDTAVYYCARDPNPWHPDYWGQG

SEQ ID NO: 8107 - protein, 16 aa, Artificial Sequence
  Description of Artificial Sequence: Synthetic antibody
CATGSSIAVAGFFDYW

SEQ ID NO: 8108 - DNA, 129 bp, Artificial Sequence
  Description of Artificial Sequence: Synthetic antibody
tgggacacatccgcgagcactgcctacatggagctgagcagcctgagatctgaagacacggctgtgtattactgtgcgacaggaagcagtatagcagtggctggtttttttgactactggggccaggga

SEQ ID NO: 8109 - protein, 43 aa, Artificial Sequence
  Description of Artificial Sequence: Synthetic antibody
WDTSASTAYMELSSLRSEDTAVYYCATGSSIAVAGFFDYWGQG

SEQ ID NO: 8110 - DNA, 129 bp, Artificial Sequence
  Description of Artificial Sequence: Synthetic antibody
agggacacatccgcgagcacagcctacatggagctgagcagcctgagatctgaagacacggctgtgtattactgtgcgacaggaagcagtatagcagtggctggtttttttgactactggggccaggga

SEQ ID NO: 8111 - protein, 43 aa, Artificial Sequence
  Description of Artificial Sequence: Synthetic antibody
RDTSASTAYMELSSLRSEDTAVYYCATGSSIAVAGFFDYWGQG

SEQ ID NO: 8112 - protein, 26 aa, Artificial Sequence
  Description of Artificial Sequence: Synthetic antibody
CAKDCIPSIVGATIVGYYYYYGMDVW

SEQ ID NO: 8113 - DNA, 129 bp, Artificial Sequence
  Description of Artificial Sequence: Synthetic antibody
caaatgaacagcctgagagccgaggacacggccgtatattactgtgcgaaagattgtatccctagtatagtgggagctactatcgtgggttactactactactacggtatggacgtctggggccaaggg

SEQ ID NO: 8114 - protein, 43 aa, Artificial Sequence
  Description of Artificial Sequence: Synthetic antibody
QMNSLRAEDTAVYYCAKDCIPSIVGATIVGYYYYYGMDVWGQG

SEQ ID NO: 8115 - DNA, 129 bp, Artificial Sequence
  Description of Artificial Sequence: Synthetic antibody
aaaatgaactgcctgagagccgaggacacggccgtatattactgtgcgaaagattgtatccctagtatagtgggagctactatcgtgggttactactactactacggtatggacgtctggggccaaggg

SEQ ID NO: 8116 - protein, 43 aa, Artificial Sequence
  Description of Artificial Sequence: Synthetic antibody
KMNCLRAEDTAVYYCAKDCIPSIVGATIVGYYYYYGMDVWGQG

SEQ ID NO: 8117 - protein, 19 aa, Artificial Sequence
  Description of Artificial Sequence: Synthetic antibody
CTTDRIAVAGMGSGVVDYW

SEQ ID NO: 8118 - DNA, 129 bp, Artificial Sequence
  Description of Artificial Sequence: Synthetic antibody
tcaaaaaacacgctgtatctgcaaatgaacagcctgaaaaccgaggacacagccgtgtattactgtaccacagaccgtatagcagtggctggtatggggtcaggggtggttgactactggggccaggga

SEQ ID NO: 8119 - protein, 43 aa, Artificial Sequence
  Description of Artificial Sequence: Synthetic antibody
SKNTLYLQMNSLKTEDTAVYYCTTDRIAVAGMGSGVVDYWGQG

SEQ ID NO: 8120 - DNA, 129 bp, Artificial Sequence
  Description of Artificial Sequence: Synthetic antibody
ttcaaaaacacgctgtatctgcaaatgaacagcctgaaaaccgaggacacagccgtgtattactgtaccacagaccgtatagcagtggctggtatggggtcaggggtggttgactactggggccaggga

SEQ ID NO: 8121 - protein, 43 aa, Artificial Sequence
  Description of Artificial Sequence: Synthetic antibody
FKNTLYLQMNSLKTEDTAVYYCTTDRIAVAGMGSGVVDYWGQG

SEQ ID NO: 8122 - protein, 12 aa, Artificial Sequence
  Description of Artificial Sequence: Synthetic antibody
CASSSSWQFDYW

SEQ ID NO: 8123 - DNA, 129 bp, Artificial Sequence
  Description of Artificial Sequence: Synthetic antibody
ttcaccatctccagatataattccaagaacacgctgtatctgcaaatgaacagcctgagagccgaggacacggccgtatattactgtgcgagcagcagcagctggcaatttgactactggggccaggga

SEQ ID NO: 8124 - protein, 43 aa, Artificial Sequence
  Description of Artificial Sequence: Synthetic antibody
FTISRYNSKNTLYLQMNSLRAEDTAVYYCASSSSWQFDYWGQG

SEQ ID NO: 8125 - DNA, 129 bp, Artificial Sequence
  Description of Artificial Sequence: Synthetic antibody
ttcaccatctccagagataattccaagaacacgctgtatctgcaaatgaacagcctgagagccgaggacacggccgtatattactgtgcgagcagcagcagctggcaatttgactactggggccaggga

SEQ ID NO: 8126 - protein, 43 aa, Artificial Sequence
  Description of Artificial Sequence: Synthetic antibody
FTISRDNSKNTLYLQMNSLRAEDTAVYYCASSSSWQFDYWGQG

SEQ ID NO: 8127 - protein, 21 aa, Artificial Sequence
  Description of Artificial Sequence: Synthetic antibody
CARGHLLPPDYDILTGYFDYW

SEQ ID NO: 8128 - DNA, 129 bp, Artificial Sequence
  Description of Artificial Sequence: Synthetic antibody
aactcactgtatctgcaaatgaacagcctgagagacgaggatacggctgtgtattactgtgcgagaggccatttactcccacctgattacgatattttgactggttattttgactactggggccaggga

SEQ ID NO: 8129 - protein, 43 aa, Artificial Sequence
  Description of Artificial Sequence: Synthetic antibody
NSLYLQMNSLRDEDTAVYYCARGHLLPPDYDILTGYFDYWGQG

SEQ ID NO: 8130 - DNA, 129 bp, Artificial Sequence
  Description of Artificial Sequence: Synthetic antibody
aactcactgtatctgcaaatgaacagcctgagagacgaggacacggctgtgtattactgtgcgagaggccatttactcccacctgattacgatattttgactggttattttgactactggggccaggga

SEQ ID NO: 8131 - protein, 17 aa, Artificial Sequence
  Description of Artificial Sequence: Synthetic antibody
CARANFMGLEMARFDYW

SEQ ID NO: 8132 - DNA, 129 bp, Artificial Sequence
  Description of Artificial Sequence: Synthetic antibody
gacacattcacgagcacagcctacatggagctgaggagcctgagatctgacgacacggccgtgtattactgtgcgagagctaattttatggggctagagatggctaggtttgactactggggccagggg

SEQ ID NO: 8133 - protein, 43 aa, Artificial Sequence
  Description of Artificial Sequence: Synthetic antibody
DTFTSTAYMELRSLRSDDTAVYYCARANFMGLEMARFDYWGQG

SEQ ID NO: 8134 - DNA, 129 bp, Artificial Sequence
  Description of Artificial Sequence: Synthetic antibody
gacacatccacgagcacagcctacatggagctgaggagcctgagatctgacgacacggccgtgtattactgtgcgagagctaattttatggggttagagatggctaggtttgactactggggccaggga

SEQ ID NO: 8135 - protein, 43 aa, Artificial Sequence
  Description of Artificial Sequence: Synthetic antibody
DTSTSTAYMELRSLRSDDTAVYYCARANFMGLEMARFDYWGQG

SEQ ID NO: 8136 - protein, 19 aa, Artificial Sequence
  Description of Artificial Sequence: Synthetic antibody
CARQIFYGSGSYYSYFDYW

SEQ ID NO: 8137 - DNA, 129 bp, Artificial Sequence
  Description of Artificial Sequence: Synthetic antibody
tccatcagcaccgcctacctgctgtggagcagcctgaaggcctcggacaccgccaggtattactgtgcgagacagatcttctatggttcggggagttattactcatactttgactactggggccaggga

SEQ ID NO: 8138 - protein, 43 aa, Artificial Sequence
  Description of Artificial Sequence: Synthetic antibody
SISTAYLLWSSLKASDTARYYCARQIFYGSGSYYSYFDYWGQG

SEQ ID NO: 8139 - DNA, 129 bp, Artificial Sequence
  Description of Artificial Sequence: Synthetic antibody
tccatcagcaccgcctacctgcagtggagcagcctgaaggcctcggacaccgccatgtattactgtgcgagacagatcttctatggttcggggagttattactcatactttgactactggggccaggga

SEQ ID NO: 8140 - protein, 43 aa, Artificial Sequence
  Description of Artificial Sequence: Synthetic antibody
SISTAYLQWSSLKASDTAMYYCARQIFYGSGSYYSYFDYWGQG

SEQ ID NO: 8141 - protein, 16 aa, Artificial Sequence
  Description of Artificial Sequence: Synthetic antibody
CTRHYDILTGYRFDLW

SEQ ID NO: 8142 - DNA, 129 bp, Artificial Sequence
  Description of Artificial Sequence: Synthetic antibody
tgtgatgattcaaagaacacggcgtatctgcaaatgaacagcctgaaaaccgaggacacggccgtgtattactgtactagacattacgatattttgactggttatcgcttcgatctctggggccgtggc

SEQ ID NO: 8143 - protein, 43 aa, Artificial Sequence
  Description of Artificial Sequence: Synthetic antibody
CDDSKNTAYLQMNSLKTEDTAVYYCTRHYDILTGYRFDLWGRG

SEQ ID NO: 8144 - DNA, 129 bp, Artificial Sequence
  Description of Artificial Sequence: Synthetic antibody
agagatgattcaaagaacacggcgtatctgcaaatgaacagcctgaaaaccgaggacacggccgtgtattactgtactagacattacgatattttgactggttatcgcttcgatctctggggccgtggc

SEQ ID NO: 8145 - protein, 43 aa, Artificial Sequence
  Description of Artificial Sequence: Synthetic antibody
RDDSKNTAYLQMNSLKTEDTAVYYCTRHYDILTGYRFDLWGRG

SEQ ID NO: 8146 - protein, 22 aa, Artificial Sequence
  Description of Artificial Sequence: Synthetic antibody
CAKDISKIKSWYDLGGGAFDLW

SEQ ID NO: 8147 - DNA, 129 bp, Artificial Sequence
  Description of Artificial Sequence: Synthetic antibody
tccctgtatctgcaaatgaacagtctgagagctgaggacacggccttgtattactgtgcaaaagatatctctaagatcaagagctggtacgatctaggtggaggggccttcgatctctggggccgtggc

SEQ ID NO: 8148 - protein, 43 aa, Artificial Sequence
  Description of Artificial Sequence: Synthetic antibody
SLYLQMNSLRAEDTALYYCAKDISKIKSWYDLGGGAFDLWGRG

SEQ ID NO: 8149 - DNA, 129 bp, Artificial Sequence
  Description of Artificial Sequence: Synthetic antibody
tacctgtatctgcaaatgatcagtctgagagctgaggacacggccttgtattactgtgcaaaagatatctctaagatcaagagctggtacgatctaggtggaggggccttcgatctctggggccgtggc

SEQ ID NO: 8150 - protein, 43 aa, Artificial Sequence
  Description of Artificial Sequence: Synthetic antibody
YLYLQMISLRAEDTALYYCAKDISKIKSWYDLGGGAFDLWGRG

SEQ ID NO: 8151 - protein, 19 aa, Artificial Sequence
  Description of Artificial Sequence: Synthetic antibody
CARDIGSTLPYYYYGMDVW

SEQ ID NO: 8152 - DNA, 129 bp, Artificial Sequence
  Description of Artificial Sequence: Synthetic antibody
tccacgagcacagcctacatggagctgagcagcctgagatctgaggacacggccgtgtattactgtgcgagagatataggcagcaccctaccatactattactacggtatggacgtctggggccaaggg

SEQ ID NO: 8153 - protein, 43 aa, Artificial Sequence
  Description of Artificial Sequence: Synthetic antibody
STSTAYMELSSLRSEDTAVYYCARDIGSTLPYYYYGMDVWGQG

SEQ ID NO: 8154 - DNA, 129 bp, Artificial Sequence
  Description of Artificial Sequence: Synthetic antibody
tccacgagcacagcctacatggagctgagcagcctgagatctgaggacacggccgtgtattactgtgcgagagatataggcagcaccctaccatactactactacggtatggacgtctggggccaaggg

SEQ ID NO: 8155 - protein, 17 aa, Artificial Sequence
  Description of Artificial Sequence: Synthetic antibody
CAKDIKQQLVLDAFDIW

SEQ ID NO: 8156 - DNA, 129 bp, Artificial Sequence
  Description of Artificial Sequence: Synthetic antibody
gacaacagcaaaaactccctgtatctgcaaatgaacagtctgagaactgaggacaccgccttgtattactgtgcaaaagatattaagcagcagctggtactggatgcttttgatatctggggccaaggg

SEQ ID NO: 8157 - protein, 43 aa, Artificial Sequence
  Description of Artificial Sequence: Synthetic antibody
DNSKNSLYLQMNSLRTEDTALYYCAKDIKQQLVLDAFDIWGQG

SEQ ID NO: 8158 - DNA, 129 bp, Artificial Sequence
  Description of Artificial Sequence: Synthetic antibody
gacaacagcaaaaactccctgtatctgcaaatgaacagtctgagaactgaggacaccgcctcgtattactgtgcaaaagatattaagcagcagctggtactggatgcttttgatatctggggccaaggg

SEQ ID NO: 8159 - protein, 43 aa, Artificial Sequence
  Description of Artificial Sequence: Synthetic antibody
DNSKNSLYLQMNSLRTEDTASYYCAKDIKQQLVLDAFDIWGQG

SEQ ID NO: 8160 - protein, 16 aa, Artificial Sequence
  Description of Artificial Sequence: Synthetic antibody
CAKQQQLVPKSHFDYW

SEQ ID NO: 8161 - DNA, 129 bp, Artificial Sequence
  Description of Artificial Sequence: Synthetic antibody
agagacaattccaagaacacgctgtatctgcaaatgaacagcctgagagccgaggacacggccgtatattactgtgcgaagcagcagcagctggttcccaaaagccattttgactactggggccaggga

SEQ ID NO: 8162 - protein, 43 aa, Artificial Sequence
  Description of Artificial Sequence: Synthetic antibody
RDNSKNTLYLQMNSLRAEDTAVYYCAKQQQLVPKSHFDYWGQG

SEQ ID NO: 8163 - DNA, 129 bp, Artificial Sequence
  Description of Artificial Sequence: Synthetic antibody
agagacaattccaagaacacgctgtatctgcaaatgaacagcctgagagccgaggacacggccgtatattactgtgcgaagcaacagcagctggttcccaaaagccattttgactactggggccaggga

SEQ ID NO: 8164 - protein, 17 aa, Artificial Sequence
  Description of Artificial Sequence: Synthetic antibody
CSRGGGPAAGFHGLDVW

SEQ ID NO: 8165 - DNA, 129 bp, Artificial Sequence
  Description of Artificial Sequence: Synthetic antibody
gacacatccgcgaacacagcctgcatggaactgagtggcctgagatctgaagacacggctgcgtatttctgttcgaggggagggggcccagcagctggtttccacggtttggacgtctggggccaaggg

SEQ ID NO: 8166 - protein, 43 aa, Artificial Sequence
  Description of Artificial Sequence: Synthetic antibody
DTSANTACMELSGLRSEDTAAYFCSRGGGPAAGFHGLDVWGQG

SEQ ID NO: 8167 - DNA, 129 bp, Artificial Sequence
  Description of Artificial Sequence: Synthetic antibody
gacacatccgcgaacacagcctacatggaactgagtggcctgagatctgaagacacggctgtgtatttctgttcgaggggagggggcccagcagctggtttccacggtttggacgtctggggccaaggg

SEQ ID NO: 8168 - protein, 43 aa, Artificial Sequence
  Description of Artificial Sequence: Synthetic antibody
DTSANTAYMELSGLRSEDTAVYFCSRGGGPAAGFHGLDVWGQG

SEQ ID NO: 8169 - protein, 25 aa, Artificial Sequence
  Description of Artificial Sequence: Synthetic antibody
CARGGYCSSTSCYGGNYYYYGMDVW

SEQ ID NO: 8170 - DNA, 129 bp, Artificial Sequence
  Description of Artificial Sequence: Synthetic antibody
ttggagctgaggagcctgagatctgacgacacggccgtgtattactgtgcgagagggggatattgtagtagtaccagctgctatggcgggaactactactactacggtatggacgtctggggccaaggg

SEQ ID NO: 8171 - protein, 43 aa, Artificial Sequence
  Description of Artificial Sequence: Synthetic antibody
LELRSLRSDDTAVYYCARGGYCSSTSCYGGNYYYYGMDVWGQG

SEQ ID NO: 8172 - DNA, 129 bp, Artificial Sequence
  Description of Artificial Sequence: Synthetic antibody
atggagctgaggagcctgagatctgacgacacggccgtgtattactgtgcgagagggggatattgtagtagtaccagctgctatggcgggaactactactactacggtatggacgtctggggccaaggg

SEQ ID NO: 8173 - protein, 43 aa, Artificial Sequence
  Description of Artificial Sequence: Synthetic antibody
MELRSLRSDDTAVYYCARGGYCSSTSCYGGNYYYYGMDVWGQG

SEQ ID NO: 8174 - protein, 17 aa, Artificial Sequence
  Description of Artificial Sequence: Synthetic antibody
CARGGPYCGGDCYVDYW

SEQ ID NO: 8175 - DNA, 129 bp, Artificial Sequence
  Description of Artificial Sequence: Synthetic antibody
gacacgtccatcagcacagcctacatggaactgagcaggctgagatctgacgacacggccgtatattactgtgcgaggggaggtccatattgtggtggtgactgctacgttgactactggggccaggga

SEQ ID NO: 8176 - protein, 43 aa, Artificial Sequence
  Description of Artificial Sequence: Synthetic antibody
DTSISTAYMELSRLRSDDTAVYYCARGGPYCGGDCYVDYWGQG

SEQ ID NO: 8177 - DNA, 129 bp, Artificial Sequence
  Description of Artificial Sequence: Synthetic antibody
gacacgtccatcagcacagcctacatggaactgagcaggctgagatctgacgacacggccgtatattactgtgcgaggggaggcccatattgtggtggtgactgctacgttgactactggggccaggga

SEQ ID NO: 8178 - protein, 18 aa, Artificial Sequence
  Description of Artificial Sequence: Synthetic antibody
CAKDRRLDYDDSGSFDSW

SEQ ID NO: 8179 - DNA, 129 bp, Artificial Sequence
  Description of Artificial Sequence: Synthetic antibody
gattccgagaacacattgtatctgcacatgagtggcctgcgagccgaagacacggccgtatattactgtgcgaaagatcggcgcctcgactatgatgatagtggctcctttgactcctggggccaggga

SEQ ID NO: 8180 - protein, 43 aa, Artificial Sequence
  Description of Artificial Sequence: Synthetic antibody
DSENTLYLHMSGLRAEDTAVYYCAKDRRLDYDDSGSFDSWGQG

SEQ ID NO: 8181 - DNA, 129 bp, Artificial Sequence
  Description of Artificial Sequence: Synthetic antibody
gattccgacaacacattgtatctgcacatgaggggcctgcgagccgaagacacggccgtatattactgtgcgaaagatcggcgcctcgactatgatgatagtggctcctttgactcctggggccaggga

SEQ ID NO: 8182 - protein, 43 aa, Artificial Sequence
  Description of Artificial Sequence: Synthetic antibody
DSDNTLYLHMRGLRAEDTAVYYCAKDRRLDYDDSGSFDSWGQG

SEQ ID NO: 8183 - protein, 24 aa, Artificial Sequence
  Description of Artificial Sequence: Synthetic antibody
CARVHHYDFWSGYYYPYYYGMDVW

SEQ ID NO: 8184 - DNA, 129 bp, Artificial Sequence
  Description of Artificial Sequence: Synthetic antibody
atcttgaaaatcaacagtctgagagccgaggacacggctgtgtattactgtgcaagagtccaccattacgatttttggagtggttattattatccctactactacggtatggacgtctggggccaaggg

SEQ ID NO: 8185 - protein, 43 aa, Artificial Sequence
  Description of Artificial Sequence: Synthetic antibody
ILKINSLRAEDTAVYYCARVHHYDFWSGYYYPYYYGMDVWGQG

SEQ ID NO: 8186 - DNA, 129 bp, Artificial Sequence
  Description of Artificial Sequence: Synthetic antibody
tatctgcaaatgaacagtctgagagccgaggacacggctgtgtattactgtgcaagagtccaccattacgatttttggagtggttattattatccctactactacggtatggacgtctggggccaaggg

SEQ ID NO: 8187 - protein, 43 aa, Artificial Sequence
  Description of Artificial Sequence: Synthetic antibody
YLQMNSLRAEDTAVYYCARVHHYDFWSGYYYPYYYGMDVWGQG

SEQ ID NO: 8188 - protein, 21 aa, Artificial Sequence
  Description of Artificial Sequence: Synthetic antibody
CAKDFFPSQRIYGSGSCFDYW

SEQ ID NO: 8189 - DNA, 129 bp, Artificial Sequence
  Description of Artificial Sequence: Synthetic antibody
aacacgctgtatctgcaaatgaacagcctgagagccgaggacacggccgtatattactgtgcgaaagattttttcccctcgcaacgaatatatggttcggggagttgctttgactactggggccaggga

SEQ ID NO: 8190 - protein, 43 aa, Artificial Sequence
  Description of Artificial Sequence: Synthetic antibody
NTLYLQMNSLRAEDTAVYYCAKDFFPSQRIYGSGSCFDYWGQG

SEQ ID NO: 8191 - DNA, 129 bp, Artificial Sequence
  Description of Artificial Sequence: Synthetic antibody
aacacgctgtatccgcaaatgaacagcctgagagccgaggacacggccgtatattactgtgcgaaagattttttcccctcgcaacgaatatatggttcggggagttgctttgactactggggccaggga

SEQ ID NO: 8192 - protein, 43 aa, Artificial Sequence
  Description of Artificial Sequence: Synthetic antibody
NTLYPQMNSLRAEDTAVYYCAKDFFPSQRIYGSGSCFDYWGQG

SEQ ID NO: 8193 - protein, 21 aa, Artificial Sequence
  Description of Artificial Sequence: Synthetic antibody
CTRHRDHIVGVGYYYYGMDVW

SEQ ID NO: 8194 - DNA, 129 bp, Artificial Sequence
  Description of Artificial Sequence: Synthetic antibody
aacacggcgtatctgcaaatgaacagcctgaaaaccgaggacacggccgtgtattactgtactagacatcgcgatcatattgtgggggttgggtactactactacggtatggacgtctggggccaaggg

SEQ ID NO: 8195 - protein, 43 aa, Artificial Sequence
  Description of Artificial Sequence: Synthetic antibody
NTAYLQMNSLKTEDTAVYYCTRHRDHIVGVGYYYYGMDVWGQG

SEQ ID NO: 8196 - DNA, 129 bp, Artificial Sequence
  Description of Artificial Sequence: Synthetic antibody
tacacggcgtatctgcaaatgaacagcctgaaaaccgaggacacggccgtgtattactgtactagacatcgcgatcatattgtgggggttgggtactactactacggtatggacgtctggggccaaggg

SEQ ID NO: 8197 - protein, 43 aa, Artificial Sequence
  Description of Artificial Sequence: Synthetic antibody
YTAYLQMNSLKTEDTAVYYCTRHRDHIVGVGYYYYGMDVWGQG

SEQ ID NO: 8198 - protein, 21 aa, Artificial Sequence
  Description of Artificial Sequence: Synthetic antibody
CARGLIAAAGTAVPDASMDVW

SEQ ID NO: 8199 - DNA, 129 bp, Artificial Sequence
  Description of Artificial Sequence: Synthetic antibody
aactccttgtatcttcaaatgaacagcctgagagccggggacacggctgtgtattactgtgcaagagggctcatagcagcagctggtaccgccgtccctgatgctagtatggacgtctggggccaaggg

SEQ ID NO: 8200 - protein, 43 aa, Artificial Sequence
  Description of Artificial Sequence: Synthetic antibody
NSLYLQMNSLRAGDTAVYYCARGLIAAAGTAVPDASMDVWGQG

SEQ ID NO: 8201 - DNA, 129 bp, Artificial Sequence
  Description of Artificial Sequence: Synthetic antibody
gaactccttgtatcttcaatgaacagcctgagagccggggacacggctgtgtattactgtgcaagagggctcatagcagcagctggtaccgccgtccctgatgctagtatggacgtctggggccaaggg

SEQ ID NO: 8202 - protein, 43 aa, Artificial Sequence
  Description of Artificial Sequence: Synthetic antibody
ELLVSSMNSLRAGDTAVYYCARGLIAAAGTAVPDASMDVWGQG

SEQ ID NO: 8203 - protein, 14 aa, Artificial Sequence
  Description of Artificial Sequence: Synthetic antibody
CAHRLRYSSGVDYW

SEQ ID NO: 8204 - DNA, 129 bp, Artificial Sequence
  Description of Artificial Sequence: Synthetic antibody
catcaccaaggacacctccaaaaccaggtggtccttacaatgaccaacatggaccctgtggacacagccacatattactgtgcacacagactaaggtatagcagtggcgttgactactggggccaggga

SEQ ID NO: 8205 - protein, 43 aa, Artificial Sequence
  Description of Artificial Sequence: Synthetic antibody
HHQGHLQNQVVLTMTNMDPVDTATYYCAHRLRYSSGVDYWGQG

SEQ ID NO: 8206 - DNA, 129 bp, Artificial Sequence
  Description of Artificial Sequence: Synthetic antibody
atcaccaaggacacctccaaaaaccaggtggtccttacaatgaccaacatggaccctgtggacacagccacatattactgtgcacacagactaaggtatagcagtggcgttgactactggggccaggga

SEQ ID NO: 8207 - protein, 43 aa, Artificial Sequence
  Description of Artificial Sequence: Synthetic antibody
ITKDTSKNQVVLTMTNMDPVDTATYYCAHRLRYSSGVDYWGQG

SEQ ID NO: 8208 - protein, 24 aa, Artificial Sequence
  Description of Artificial Sequence: Synthetic antibody
CAKAWGYSSGWYGSWVSENAFDIW

SEQ ID NO: 8209 - DNA, 129 bp, Artificial Sequence
  Description of Artificial Sequence: Synthetic antibody
tatctgcaattgaacagcctgagagccgaggacacggccgtatattactgtgcgaaagcgtggggatatagcagtggctggtacgggtcgtgggtcagtgaaaatgcttttgatatctggggccaaggg

SEQ ID NO: 8210 - protein, 43 aa, Artificial Sequence
  Description of Artificial Sequence: Synthetic antibody
YLQLNSLRAEDTAVYYCAKAWGYSSGWYGSWVSENAFDIWGQG

SEQ ID NO: 8211 - DNA, 129 bp, Artificial Sequence
  Description of Artificial Sequence: Synthetic antibody
tatctgcaaatgaacagcctgagagccgaggacacggccgtatattactgtgcgaaagcgtggggatatagcagtggctggtacgggtcgtgggtcagtgaaaatgcttttgatatctggggccaaggg

SEQ ID NO: 8212 - protein, 43 aa, Artificial Sequence
  Description of Artificial Sequence: Synthetic antibody
YLQMNSLRAEDTAVYYCAKAWGYSSGWYGSWVSENAFDIWGQG

SEQ ID NO: 8213 - protein, 13 aa, Artificial Sequence
  Description of Artificial Sequence: Synthetic antibody
CARGRWLDWFDPW

SEQ ID NO: 8214 - DNA, 129 bp, Artificial Sequence
  Description of Artificial Sequence: Synthetic antibody
accatgaccacagacacatccacgagcacagcctacatggagctgaggagcctgagatctgacgacatggccgtgtattactgtgcgagaggtcggtggctggactggttcgacccctggggccaggga

SEQ ID NO: 8215 - protein, 43 aa, Artificial Sequence
  Description of Artificial Sequence: Synthetic antibody
TMTTDTSTSTAYMELRSLRSDDMAVYYCARGRWLDWFDPWGQG

SEQ ID NO: 8216 - DNA, 129 bp, Artificial Sequence
  Description of Artificial Sequence: Synthetic antibody
accatgaccacagacacatccacgagcacagcctacatggagctgaggagcctgagatctgacgacacggccgtgtattactgtgcgagaggtcggtggctggactggttcgacccctggggccaggga

SEQ ID NO: 8217 - protein, 43 aa, Artificial Sequence
  Description of Artificial Sequence: Synthetic antibody
TMTTDTSTSTAYMELRSLRSDDTAVYYCARGRWLDWFDPWGQG

SEQ ID NO: 8218 - protein, 19 aa, Artificial Sequence
  Description of Artificial Sequence: Synthetic antibody
CAKEEYYYDSSGPNWFDPW

SEQ ID NO: 8219 - DNA, 129 bp, Artificial Sequence
  Description of Artificial Sequence: Synthetic antibody
tccaagaacacgctgtatctgcaaatgaacagcctgagagccgaggacacggccgtatattactgtgcgaaagaagagtattactatgatagtagtggccccaactggttcgacccctggggccaggga

SEQ ID NO: 8220 - protein, 43 aa, Artificial Sequence
  Description of Artificial Sequence: Synthetic antibody
SKNTLYLQMNSLRAEDTAVYYCAKEEYYYDSSGPNWFDPWGQG

SEQ ID NO: 8221 - DNA, 129 bp, Artificial Sequence
  Description of Artificial Sequence: Synthetic antibody
tccaggaacacgctgtatctgcaaatgaacagcctgagagccgaggacacggccgtatattactgtgcgaaagaagagtattactatgatagtagtggccccaactggttcgacccctggggccaggga

SEQ ID NO: 8222 - protein, 43 aa, Artificial Sequence
  Description of Artificial Sequence: Synthetic antibody
SRNTLYLQMNSLRAEDTAVYYCAKEEYYYDSSGPNWFDPWGQG

SEQ ID NO: 8223 - protein, 11 aa, Artificial Sequence
  Description of Artificial Sequence: Synthetic antibody
CAKGGGLFDYW

SEQ ID NO: 8224 - DNA, 129 bp, Artificial Sequence
  Description of Artificial Sequence: Synthetic antibody
cggttcaccatctccagatataattccaagaacacgctgtatctgcaaatgaacagcctgagagccgaggacacggccgtatattactgtgcgaaaggaggcggtctctttgactactggggccaggga

SEQ ID NO: 8225 - protein, 43 aa, Artificial Sequence
  Description of Artificial Sequence: Synthetic antibody
RFTISRYNSKNTLYLQMNSLRAEDTAVYYCAKGGGLFDYWGQG

SEQ ID NO: 8226 - DNA, 129 bp, Artificial Sequence
  Description of Artificial Sequence: Synthetic antibody
cggttcaccatctccagagataattccaagaacacgctgtatctgcaaatgaacagcctgagagccgaggacacggccgtatattactgtgcgaaaggaggcggtctctttgactactggggccaggga

SEQ ID NO: 8227 - protein, 43 aa, Artificial Sequence
  Description of Artificial Sequence: Synthetic antibody
RFTISRDNSKNTLYLQMNSLRAEDTAVYYCAKGGGLFDYWGQG

SEQ ID NO: 8228 - protein, 15 aa, Artificial Sequence
  Description of Artificial Sequence: Synthetic antibody
CVRIAAAVNDAFDIW

SEQ ID NO: 8229 - DNA, 129 bp, Artificial Sequence
  Description of Artificial Sequence: Synthetic antibody
tccagatatatttccaagaacaccctgtatctgcaaatgaacagcctgagagccgaggacacggccgtatattattgtgtgagaattgcagcagctgttaatgatgcttttgatatctggggccgaggg

SEQ ID NO: 8230 - protein, 43 aa, Artificial Sequence
  Description of Artificial Sequence: Synthetic antibody
SRYISKNTLYLQMNSLRAEDTAVYYCVRIAAAVNDAFDIWGRG

SEQ ID NO: 8231 - DNA, 129 bp, Artificial Sequence
  Description of Artificial Sequence: Synthetic antibody
tccagagatatttccaagaacaccctgtatctgcaaatgaacagcctgagagccgaggacacggccgtatattattgtgtgagaattgcagcagctgttaatgatgcttttgatatctggggccgaggg

SEQ ID NO: 8232 - protein, 43 aa, Artificial Sequence
  Description of Artificial Sequence: Synthetic antibody
SRDISKNTLYLQMNSLRAEDTAVYYCVRIAAAVNDAFDIWGRG

SEQ ID NO: 8233 - protein, 16 aa, Artificial Sequence
  Description of Artificial Sequence: Synthetic antibody
CARRSPYSSAWYFDLW

SEQ ID NO: 8234 - DNA, 129 bp, Artificial Sequence
  Description of Artificial Sequence: Synthetic antibody
gccgacaagtccatcagcaccgcctacctgcagtggagcagcctgaaggcctcggacaccgccatgtattactgtgcgagacggtctccgtatagcagtgcctggtacttcgatctctggggccgtggc

SEQ ID NO: 8235 - protein, 43 aa, Artificial Sequence
  Description of Artificial Sequence: Synthetic antibody
ADKSISTAYLQWSSLKASDTAMYYCARRSPYSSAWYFDLWGRG

SEQ ID NO: 8236 - DNA, 129 bp, Artificial Sequence
  Description of Artificial Sequence: Synthetic antibody
gccgacaagtccatcagcaccacttacctgcagtggatcagcctgaaggcctcggacaccgccatctattactgtgcgagacggtctccgtatagcagtgcctggtacttcgatctctggggccgtggc

SEQ ID NO: 8237 - protein, 43 aa, Artificial Sequence
  Description of Artificial Sequence: Synthetic antibody
ADKSISTTYLQWISLKASDTAIYYCARRSPYSSAWYFDLWGRG

SEQ ID NO: 8238 - protein, 13 aa, Artificial Sequence
  Description of Artificial Sequence: Synthetic antibody
CAKDLRGDEEDYW

SEQ ID NO: 8239 - DNA, 129 bp, Artificial Sequence
  Description of Artificial Sequence: Synthetic antibody
tacatctccagagacaattccaagaacacgctgtatctgcaaatgaacagcctgagagccgaggacacggctgtgtattactgtgcgaaagatttaagaggggatgaggaggactactggggccaggga

SEQ ID NO: 8240 - protein, 43 aa, Artificial Sequence
  Description of Artificial Sequence: Synthetic antibody
YISRDNSKNTLYLQMNSLRAEDTAVYYCAKDLRGDEEDYWGQG

SEQ ID NO: 8241 - DNA, 129 bp, Artificial Sequence
  Description of Artificial Sequence: Synthetic antibody
accatctccagagacaattccaagaacacgctgtatctgcaaatgaacagcctgagagccgaggacacggctgtgtattactgtgcgaaagatttaagaggggatgaggaggactactggggccaggga

SEQ ID NO: 8242 - protein, 43 aa, Artificial Sequence
  Description of Artificial Sequence: Synthetic antibody
TISRDNSKNTLYLQMNSLRAEDTAVYYCAKDLRGDEEDYWGQG

SEQ ID NO: 8243 - protein, 29 aa, Artificial Sequence
  Description of Artificial Sequence: Synthetic antibody
CAKAYEAVATGWFYYYGSGSYYKEYFQHW

SEQ ID NO: 8244 - DNA, 129 bp, Artificial Sequence
  Description of Artificial Sequence: Synthetic antibody
tgcctgagagccgaggacacggccgtatattactgtgcgaaagcttacgaggccgtcgccaccgggtggttctattactatggttcggggagttattataaggaatacttccagcactggggccagggc

SEQ ID NO: 8245 - protein, 43 aa, Artificial Sequence
  Description of Artificial Sequence: Synthetic antibody
CLRAEDTAVYYCAKAYEAVATGWFYYYGSGSYYKEYFQHWGQG

SEQ ID NO: 8246 - DNA, 129 bp, Artificial Sequence
  Description of Artificial Sequence: Synthetic antibody
agcctgagagccgaggacacggccgtatattactgtgcgaaagcttacgaggccgtcgccaccgggtggttctattactatggttcggggagttattataaggaatacttccagcactggggccagggc

SEQ ID NO: 8247 - protein, 43 aa, Artificial Sequence
  Description of Artificial Sequence: Synthetic antibody
SLRAEDTAVYYCAKAYEAVATGWFYYYGSGSYYKEYFQHWGQG

SEQ ID NO: 8248 - protein, 22 aa, Artificial Sequence
  Description of Artificial Sequence: Synthetic antibody
CALNLGYCSGGSCYSENYLDYW

SEQ ID NO: 8249 - DNA, 129 bp, Artificial Sequence
  Description of Artificial Sequence: Synthetic antibody
tcgatgtatctgcaaatgaacagcctgagagccgaggacacggccgtatattactgtgcgctaaacctaggatattgtagtggtggtagctgctactcagaaaattatcttgactactggggccaggga

SEQ ID NO: 8250 - protein, 43 aa, Artificial Sequence
  Description of Artificial Sequence: Synthetic antibody
SMYLQMNSLRAEDTAVYYCALNLGYCSGGSCYSENYLDYWGQG

SEQ ID NO: 8251 - DNA, 129 bp, Artificial Sequence
  Description of Artificial Sequence: Synthetic antibody
acgctgtatctgcaaatgaacagcctgagagccgaggacacggccgtatattactgtgcgctaaacctaggatattgtagtggtggtagctgctactcagaaaattatcttgactactggggccaggga

SEQ ID NO: 8252 - protein, 43 aa, Artificial Sequence
  Description of Artificial Sequence: Synthetic antibody
TLYLQMNSLRAEDTAVYYCALNLGYCSGGSCYSENYLDYWGQG

SEQ ID NO: 8253 - protein, 17 aa, Artificial Sequence
  Description of Artificial Sequence: Synthetic antibody
CAHSGKTRLGELSPDYW

SEQ ID NO: 8254 - DNA, 129 bp, Artificial Sequence
  Description of Artificial Sequence: Synthetic antibody
gacacctccaaaaaccaggtggtccttacaatgaccaacatggaccctgtggacacagccacatattactgtgcacacagcgggaaaactcgtttgggggagttatcgcctgactactggggccaggga

SEQ ID NO: 8255 - protein, 43 aa, Artificial Sequence
  Description of Artificial Sequence: Synthetic antibody
DTSKNQVVLTMTNMDPVDTATYYCAHSGKTRLGELSPDYWGQG

SEQ ID NO: 8256 - DNA, 129 bp, Artificial Sequence
  Description of Artificial Sequence: Synthetic antibody
ggacacctccaaaaccaggtggtccttacaatgaccaacatggaccctgtggacacagccacatattactgtgcacacagcgggaaaactcgtttgggggagttatcgcctgactactggggccaggga

SEQ ID NO: 8257 - protein, 43 aa, Artificial Sequence
  Description of Artificial Sequence: Synthetic antibody
GHLQNQVVLTMTNMDPVDTATYYCAHSGKTRLGELSPDYWGQG

SEQ ID NO: 8258 - protein, 21 aa, Artificial Sequence
  Description of Artificial Sequence: Synthetic antibody
CARENSITGTTPYYYYGMDVW

SEQ ID NO: 8259 - DNA, 129 bp, Artificial Sequence
  Description of Artificial Sequence: Synthetic antibody
tgcacagcctacttggagctgagcagcctgagatctgaggacacggccgtgtattactgtgcgagagagaacagtataactggaacgacgccttactactactacggtatggacgtctggggccaaggg

SEQ ID NO: 8260 - protein, 43 aa, Artificial Sequence
  Description of Artificial Sequence: Synthetic antibody
CTAYLELSSLRSEDTAVYYCARENSITGTTPYYYYGMDVWGQG

SEQ ID NO: 8261 - DNA, 129 bp, Artificial Sequence
  Description of Artificial Sequence: Synthetic antibody
agcacagcctacatggagctgagcagcctgagatctgaggacacggccgtgtattactgtgcgagagagaacagtataactggaacgacgccttactactactacggtatggacgtctggggccaaggg

SEQ ID NO: 8262 - protein, 43 aa, Artificial Sequence
  Description of Artificial Sequence: Synthetic antibody
STAYMELSSLRSEDTAVYYCARENSITGTTPYYYYGMDVWGQG

SEQ ID NO: 8263 - protein, 16 aa, Artificial Sequence
  Description of Artificial Sequence: Synthetic antibody
CARDIGSGWEIYVDYW

SEQ ID NO: 8264 - DNA, 129 bp, Artificial Sequence
  Description of Artificial Sequence: Synthetic antibody
acagacaaatccacgagcacagcctgcatggagccgaggagcctgagatctgacgacacggccgtttattactgtgcgagagatattggcagtggctgggaaatttatgttgactactggggccaggga

SEQ ID NO: 8265 - protein, 43 aa, Artificial Sequence
  Description of Artificial Sequence: Synthetic antibody
TDKSTSTACMEPRSLRSDDTAVYYCARDIGSGWEIYVDYWGQG

SEQ ID NO: 8266 - DNA, 129 bp, Artificial Sequence
  Description of Artificial Sequence: Synthetic antibody
acagacaaatccacgagcacagcctacatggagctgaggagcctgagatctgacgacacggccgtttattactgtgcgagagatattggcagtggctgggaaatttatgttgactactggggccaggga

SEQ ID NO: 8267 - protein, 43 aa, Artificial Sequence
  Description of Artificial Sequence: Synthetic antibody
TDKSTSTAYMELRSLRSDDTAVYYCARDIGSGWEIYVDYWGQG

SEQ ID NO: 8268 - protein, 16 aa, Artificial Sequence
  Description of Artificial Sequence: Synthetic antibody
CARDMVAAAGTPFDYW

SEQ ID NO: 8269 - DNA, 129 bp, Artificial Sequence
  Description of Artificial Sequence: Synthetic antibody
tgggacacgtccacgagcacagtctacatggagctgagcagcctgagatctgaggacacggccgtgtattactgtgcgagagatatggtagcagcagctggtaccccctttgactactggggccaggga

SEQ ID NO: 8270 - protein, 43 aa, Artificial Sequence
  Description of Artificial Sequence: Synthetic antibody
WDTSTSTVYMELSSLRSEDTAVYYCARDMVAAAGTPFDYWGQG

SEQ ID NO: 8271 - DNA, 129 bp, Artificial Sequence
  Description of Artificial Sequence: Synthetic antibody
agggacacgtccacgagcacagtctacatggagctgagcagcctgagatctgaggacacggccgtgtattactgtgcgagagatatggtagcagcagctggtaccccctttgactactggggccaggga

SEQ ID NO: 8272 - protein, 43 aa, Artificial Sequence
  Description of Artificial Sequence: Synthetic antibody
RDTSTSTVYMELSSLRSEDTAVYYCARDMVAAAGTPFDYWGQG

SEQ ID NO: 8273 - protein, 22 aa, Artificial Sequence
  Description of Artificial Sequence: Synthetic antibody
CARDTPLGYCSGGSCPDAFDIW

SEQ ID NO: 8274 - DNA, 129 bp, Artificial Sequence
  Description of Artificial Sequence: Synthetic antibody
acagcctacttggagctgaggagcctgagatctgacgacacggccgtgtattactgtgcgagagacacacccctaggatattgtagtggtggtagctgtcctgatgcttttgatatctggggccaaggg

SEQ ID NO: 8275 - protein, 43 aa, Artificial Sequence
  Description of Artificial Sequence: Synthetic antibody
TAYLELRSLRSDDTAVYYCARDTPLGYCSGGSCPDAFDIWGQG

SEQ ID NO: 8276 - DNA, 129 bp, Artificial Sequence
  Description of Artificial Sequence: Synthetic antibody
acagcctacatggagctgaggagcctgagatctgacgacacggccgtgtattactgtgcgagagacacacccctaggatattgtagtggtggtagctgtcctgatgcttttgatatctggggccaaggg

SEQ ID NO: 8277 - protein, 43 aa, Artificial Sequence
  Description of Artificial Sequence: Synthetic antibody
TAYMELRSLRSDDTAVYYCARDTPLGYCSGGSCPDAFDIWGQG

SEQ ID NO: 8278 - protein, 16 aa, Artificial Sequence
  Description of Artificial Sequence: Synthetic antibody
CAREVVIAARSPFDYW

SEQ ID NO: 8279 - DNA, 129 bp, Artificial Sequence
  Description of Artificial Sequence: Synthetic antibody
ccagacacatccaggaaccagttctccctgcagctgaactctgtgactcccgaggacacggctgtgtattactgtgcaagagaagtggttatagcagctcgctccccttttgactactggggccaggga

SEQ ID NO: 8280 - protein, 43 aa, Artificial Sequence
  Description of Artificial Sequence: Synthetic antibody
PDTSRNQFSLQLNSVTPEDTAVYYCAREVVIAARSPFDYWGQG

SEQ ID NO: 8281 - DNA, 129 bp, Artificial Sequence
  Description of Artificial Sequence: Synthetic antibody
ccagacacatccaagaaccagttctccctgcagctgaactctgtgactcccgaggacacggctgtgtattactgtgcaagagaagtggttatagcagctcgctccccttttgactactggggccaggga

SEQ ID NO: 8282 - protein, 43 aa, Artificial Sequence
  Description of Artificial Sequence: Synthetic antibody
PDTSKNQFSLQLNSVTPEDTAVYYCAREVVIAARSPFDYWGQG

SEQ ID NO: 8283 - protein, 14 aa, Artificial Sequence
  Description of Artificial Sequence: Synthetic antibody
CTTEVVAATPVDYW

SEQ ID NO: 8284 - DNA, 129 bp, Artificial Sequence
  Description of Artificial Sequence: Synthetic antibody
atctcaagggatgattcaaaaaacacgctgtatctgcaaatgaacagcctgaaaaccgaggacacagccgtgtattactgtaccacagaagtggtagctgctactccggttgactactggggccaggga

SEQ ID NO: 8285 - protein, 43 aa, Artificial Sequence
  Description of Artificial Sequence: Synthetic antibody
ISRDDSKNTLYLQMNSLKTEDTAVYYCTTEVVAATPVDYWGQG

SEQ ID NO: 8286 - DNA, 129 bp, Artificial Sequence
  Description of Artificial Sequence: Synthetic antibody
atctcaagagatgattcaaaaaacacgctgtatctgcaaatgaacagcctgaaaaccgaggacacagccgtgtattactgtaccacagaagtggtagctgctactccggttgactactggggccaggga

SEQ ID NO: 8287 - protein, 13 aa, Artificial Sequence
  Description of Artificial Sequence: Synthetic antibody
CAKRDYYGSGHYW

SEQ ID NO: 8288 - DNA, 129 bp, Artificial Sequence
  Description of Artificial Sequence: Synthetic antibody
accatctccagagacaattccaagaacacgctgtatctgcaaatgaacagcctgagagccgaggacacggccgtatattactgtgcgaagagggattactatggttcaggacactactggggccaggga

SEQ ID NO: 8289 - protein, 43 aa, Artificial Sequence
  Description of Artificial Sequence: Synthetic antibody
TISRDNSKNTLYLQMNSLRAEDTAVYYCAKRDYYGSGHYWGQG

SEQ ID NO: 8290 - DNA, 129 bp, Artificial Sequence
  Description of Artificial Sequence: Synthetic antibody
accatctccagacacaattccaagaacacgctgtatctgcaaatgaacagcctgagagccgaggacacggccgtatattactgtgcgaagagggattactatggttcaggacactactggggccaggga

SEQ ID NO: 8291 - protein, 43 aa, Artificial Sequence
  Description of Artificial Sequence: Synthetic antibody
TISRHNSKNTLYLQMNSLRAEDTAVYYCAKRDYYGSGHYWGQG

SEQ ID NO: 8292 - protein, 19 aa, Artificial Sequence
  Description of Artificial Sequence: Synthetic antibody
CAKDAVPVTVEDYNWFDAW

SEQ ID NO: 8293 - DNA, 129 bp, Artificial Sequence
  Description of Artificial Sequence: Synthetic antibody
tctgtcaacacggcctatatactgctcagtggactaaagactgacgacactgccgtctattactgtgccaaagatgcggtgccagtcactgttgaggactataactggttcgacgcctggggtcaggga

SEQ ID NO: 8294 - protein, 43 aa, Artificial Sequence
  Description of Artificial Sequence: Synthetic antibody
SVNTAYILLSGLKTDDTAVYYCAKDAVPVTVEDYNWFDAWGQG

SEQ ID NO: 8295 - DNA, 129 bp, Artificial Sequence
  Description of Artificial Sequence: Synthetic antibody
tatgtcaacacggcctatatactgctcagtggactaaagactgacgacactgccgtctattactgtgccaaagatgcggtgccagtcactgttgaggactataactggttcgacgcctggggtcaggga

SEQ ID NO: 8296 - protein, 43 aa, Artificial Sequence
  Description of Artificial Sequence: Synthetic antibody
YVNTAYILLSGLKTDDTAVYYCAKDAVPVTVEDYNWFDAWGQG

SEQ ID NO: 8297 - protein, 18 aa, Artificial Sequence
  Description of Artificial Sequence: Synthetic antibody
CAREPTGQLWVRNWFDPW

SEQ ID NO: 8298 - DNA, 129 bp, Artificial Sequence
  Description of Artificial Sequence: Synthetic antibody
acatccaagaaccacgtctccctgcagctgaactctgtgactcccgaggacacggctgtctattattgtgcaagagaaccgacaggacagctatgggtgaggaactggttcgacccctggggccaggga

SEQ ID NO: 8299 - protein, 43 aa, Artificial Sequence
  Description of Artificial Sequence: Synthetic antibody
TSKNHVSLQLNSVTPEDTAVYYCAREPTGQLWVRNWFDPWGQG

SEQ ID NO: 8300 - DNA, 129 bp, Artificial Sequence
  Description of Artificial Sequence: Synthetic antibody
acatccaagaaccacgtctccctgcagctgaaccctgtgactcccgaggacacggctgtctattattgtgcaagagaaccgacaggacagctatgggtgaggaactggttcgacccctggggccaggga

SEQ ID NO: 8301 - protein, 43 aa, Artificial Sequence
  Description of Artificial Sequence: Synthetic antibody
TSKNHVSLQLNPVTPEDTAVYYCAREPTGQLWVRNWFDPWGQG

SEQ ID NO: 8302 - protein, 20 aa, Artificial Sequence
  Description of Artificial Sequence: Synthetic antibody
CAKILATYYDLLTGYALDYW

SEQ ID NO: 8303 - DNA, 129 bp, Artificial Sequence
  Description of Artificial Sequence: Synthetic antibody
aaggacacgcttaatctgcaaatgaacagcctgagaggcgaggacacggccgtatattactgtgcgaaaatattggcgacgtattacgatcttttgactggttatgctctagactactggggccaggga

SEQ ID NO: 8304 - protein, 43 aa, Artificial Sequence
  Description of Artificial Sequence: Synthetic antibody
KDTLNLQMNSLRGEDTAVYYCAKILATYYDLLTGYALDYWGQG

SEQ ID NO: 8305 - DNA, 129 bp, Artificial Sequence
  Description of Artificial Sequence: Synthetic antibody
aaggacacgctgaatctgcaaatgaacagcctgagagtcgaggacacggccgtatattactgtgcgaaaatattggcgacgtattacgatcttttgactggttatgctctagactactggggccaggga

SEQ ID NO: 8306 - protein, 43 aa, Artificial Sequence
  Description of Artificial Sequence: Synthetic antibody
KDTLNLQMNSLRVEDTAVYYCAKILATYYDLLTGYALDYWGQG

SEQ ID NO: 8307 - protein, 25 aa, Artificial Sequence
  Description of Artificial Sequence: Synthetic antibody
CARGLLGSGSYYRPNYYYYYGMDVW

SEQ ID NO: 8308 - DNA, 129 bp, Artificial Sequence
  Description of Artificial Sequence: Synthetic antibody
ttggagctgaggagcctgagatctgacgacacggccgtgtattactgtgcgagaggacttttaggttcagggagttattaccgcccgaattactactactactacggtatggacgtctggggccaaggg

SEQ ID NO: 8309 - protein, 43 aa, Artificial Sequence
  Description of Artificial Sequence: Synthetic antibody
LELRSLRSDDTAVYYCARGLLGSGSYYRPNYYYYYGMDVWGQG

SEQ ID NO: 8310 - DNA, 129 bp, Artificial Sequence
  Description of Artificial Sequence: Synthetic antibody
atggagctgaggagcctgagatctgacgacacggccgtgtattactgtgcgagaggacttttaggttcagggagttattaccgcccgaattactactactactacggtatggacgtctggggccaaggg

SEQ ID NO: 8311 - protein, 43 aa, Artificial Sequence
  Description of Artificial Sequence: Synthetic antibody
MELRSLRSDDTAVYYCARGLLGSGSYYRPNYYYYYGMDVWGQG

SEQ ID NO: 8312 - protein, 18 aa, Artificial Sequence
  Description of Artificial Sequence: Synthetic antibody
CAKLQRGQQLVSPALDYW

SEQ ID NO: 8313 - DNA, 129 bp, Artificial Sequence
  Description of Artificial Sequence: Synthetic antibody
aattccaagaacacgctgtatctgcaaatgaacagcctgagagccgaggacacggccgtatattactgtgcgaaactccaaaggggacagcagctggtatccccggcgctggactactggggccaggga

SEQ ID NO: 8314 - protein, 43 aa, Artificial Sequence
  Description of Artificial Sequence: Synthetic antibody
NSKNTLYLQMNSLRAEDTAVYYCAKLQRGQQLVSPALDYWGQG

SEQ ID NO: 8315 - DNA, 129 bp, Artificial Sequence
  Description of Artificial Sequence: Synthetic antibody
aattccaagaacacactgtatctgcaaatgaacagcctgagagccgaggacacggccgtatattactgtgcgaaactccaaaggggacagcagctggtatccccggcgctggactactggggccaggga

SEQ ID NO: 8316 - protein, 16 aa, Artificial Sequence
  Description of Artificial Sequence: Synthetic antibody
CAHMWQYSSSPYFDYW

SEQ ID NO: 8317 - DNA, 129 bp, Artificial Sequence
  Description of Artificial Sequence: Synthetic antibody
caaggacacctccaaaaccaggtggtccttacaatgaccaacatggaccctgtggacacagccacatattactgtgcacacatgtggcaatatagcagctcgccttactttgactactggggccaggga

SEQ ID NO: 8318 - protein, 43 aa, Artificial Sequence
  Description of Artificial Sequence: Synthetic antibody
QGHLQNQVVLTMTNMDPVDTATYYCAHMWQYSSSPYFDYWGQG

SEQ ID NO: 8319 - DNA, 129 bp, Artificial Sequence
  Description of Artificial Sequence: Synthetic antibody
aaggacacctccaaaaaccaggtggtccttacaatgaccaacatggaccctgtggacacagccacatattactgtgcacacatgtggcaatatagcagctcgccttactttgactactggggccaggga

SEQ ID NO: 8320 - protein, 43 aa, Artificial Sequence
  Description of Artificial Sequence: Synthetic antibody
KDTSKNQVVLTMTNMDPVDTATYYCAHMWQYSSSPYFDYWGQG

SEQ ID NO: 8321 - protein, 19 aa, Artificial Sequence
  Description of Artificial Sequence: Synthetic antibody
CARETYYYGSGSHGNFDYW

SEQ ID NO: 8322 - DNA, 129 bp, Artificial Sequence
  Description of Artificial Sequence: Synthetic antibody
gccaaggactcactgtatctgcaaatgaacagcctgagagacgaggacacggctgtgtattactgtgcgagggaaacgtattactatggttcggggagtcatgggaactttgactactggggccaggga

SEQ ID NO: 8323 - protein, 43 aa, Artificial Sequence
  Description of Artificial Sequence: Synthetic antibody
AKDSLYLQMNSLRDEDTAVYYCARETYYYGSGSHGNFDYWGQG

SEQ ID NO: 8324 - DNA, 129 bp, Artificial Sequence
  Description of Artificial Sequence: Synthetic antibody
gccaagaactcactgtatctgcaaatgaacagcctgagagacgaggacacggctgtgtattactgtgcgagggaaacgtattactatggttcggggagtcatgggaactttgactactggggccaggga

SEQ ID NO: 8325 - protein, 43 aa, Artificial Sequence
  Description of Artificial Sequence: Synthetic antibody
AKNSLYLQMNSLRDEDTAVYYCARETYYYGSGSHGNFDYWGQG

SEQ ID NO: 8326 - protein, 19 aa, Artificial Sequence
  Description of Artificial Sequence: Synthetic antibody
CAKDRNGGSGSYSFAFDIW

SEQ ID NO: 8327 - DNA, 129 bp, Artificial Sequence
  Description of Artificial Sequence: Synthetic antibody
tccaataactcgctgtatctgcaaatgaacagcctgagagccgaggacacggccgtatattactgtgcgaaagataggaacggagggagtgggagctactcttttgcttttgatatctggggccaaggg

SEQ ID NO: 8328 - protein, 43 aa, Artificial Sequence
  Description of Artificial Sequence: Synthetic antibody
SNNSLYLQMNSLRAEDTAVYYCAKDRNGGSGSYSFAFDIWGQG

SEQ ID NO: 8329 - DNA, 129 bp, Artificial Sequence
  Description of Artificial Sequence: Synthetic antibody
tccaagaacacgctgtatctgcaaatgaacagcctgagagccgaggacacggccgtatattactgtgcgaaagataggaacggagggagtgggagctactcttttgcttttgatatctggggccaaggg

SEQ ID NO: 8330 - protein, 43 aa, Artificial Sequence
  Description of Artificial Sequence: Synthetic antibody
SKNTLYLQMNSLRAEDTAVYYCAKDRNGGSGSYSFAFDIWGQG

SEQ ID NO: 8331 - protein, 21 aa, Artificial Sequence
  Description of Artificial Sequence: Synthetic antibody
CAHVNLRYFASGNFYTTFDYW

SEQ ID NO: 8332 - DNA, 129 bp, Artificial Sequence
  Description of Artificial Sequence: Synthetic antibody
aatcaggtggtccttacaatgaccaacgtggaccctgtggacacagccacatatttctgcgcacacgtgaatctccggtactttgcttcgggaaatttttataccacttttgactactggggccaggga

SEQ ID NO: 8333 - protein, 43 aa, Artificial Sequence
  Description of Artificial Sequence: Synthetic antibody
NQVVLTMTNVDPVDTATYFCAHVNLRYFASGNFYTTFDYWGQG

SEQ ID NO: 8334 - DNA, 129 bp, Artificial Sequence
  Description of Artificial Sequence: Synthetic antibody
aatcaggtggtccttacaatgaccaacgtggaccccgtggacacagccacatatttctgcgcacacgtgaatctccggtactttgcttcgggaaatttttataccacttttgactactggggccaggga

SEQ ID NO: 8335 - protein, 20 aa, Artificial Sequence
  Description of Artificial Sequence: Synthetic antibody
CARGVLYSSSPRWDDAFDIW

SEQ ID NO: 8336 - DNA, 129 bp, Artificial Sequence
  Description of Artificial Sequence: Synthetic antibody
acgagcacagcctacatggagctgaggagcctgagatctgacgacacggccgtgtattgctgtgcgaggggggtcctgtatagcagctcgccccgttgggatgatgcttttgatatctggggccaaggg

SEQ ID NO: 8337 - protein, 43 aa, Artificial Sequence
  Description of Artificial Sequence: Synthetic antibody
TSTAYMELRSLRSDDTAVYCCARGVLYSSSPRWDDAFDIWGQG

SEQ ID NO: 8338 - DNA, 129 bp, Artificial Sequence
  Description of Artificial Sequence: Synthetic antibody
acgagcacagcctacatggagctgaggagcctgagatctgacgacacggccgtgtattactgtgcgaggggggtcctgtatagcagctcgccccgttgggatgatgcttttgatatctggggccaaggg

SEQ ID NO: 8339 - protein, 43 aa, Artificial Sequence
  Description of Artificial Sequence: Synthetic antibody
TSTAYMELRSLRSDDTAVYYCARGVLYSSSPRWDDAFDIWGQG

SEQ ID NO: 8340 - protein, 18 aa, Artificial Sequence
  Description of Artificial Sequence: Synthetic antibody
CARQGGSGSYTYYGMDVW

SEQ ID NO: 8341 - DNA, 129 bp, Artificial Sequence
  Description of Artificial Sequence: Synthetic antibody
tcgtccaagaaccagtgctccctgaagctgagctctgtgaccgccgcagacacggctgtgtattactgtgcgagacagggaggttcggggagttatacctactacggtatggacgtctggggccaaggg

SEQ ID NO: 8342 - protein, 43 aa, Artificial Sequence
  Description of Artificial Sequence: Synthetic antibody
SSKNQCSLKLSSVTAADTAVYYCARQGGSGSYTYYGMDVWGQG

SEQ ID NO: 8343 - DNA, 129 bp, Artificial Sequence
  Description of Artificial Sequence: Synthetic antibody
acgtccaagaaccagttctccctgaagctgagctctgtgaccgccgcagacacggctgtgtattactgtgcgagacagggaggttcggggagttatacctactacggtatggacgtctggggccaaggg

SEQ ID NO: 8344 - protein, 43 aa, Artificial Sequence
  Description of Artificial Sequence: Synthetic antibody
TSKNQFSLKLSSVTAADTAVYYCARQGGSGSYTYYGMDVWGQG

SEQ ID NO: 8345 - protein, 16 aa, Artificial Sequence
  Description of Artificial Sequence: Synthetic antibody
CARDVDSSGWYYFDYW

SEQ ID NO: 8346 - DNA, 129 bp, Artificial Sequence
  Description of Artificial Sequence: Synthetic antibody
gcggacaaatccacgagcacagcctacatggagctgagcagcctgagatctgaggacgcggccgtgtattactgtgcgagagacgtggacagcagtggctggtactactttgactactggggccaggga

SEQ ID NO: 8347 - protein, 43 aa, Artificial Sequence
  Description of Artificial Sequence: Synthetic antibody
ADKSTSTAYMELSSLRSEDAAVYYCARDVDSSGWYYFDYWGQG

SEQ ID NO: 8348 - DNA, 129 bp, Artificial Sequence
  Description of Artificial Sequence: Synthetic antibody
gcggacaaatccacgagcacagcctacatggagctgagcagcctgagatctgaggacacggccgtgtattactgtgcgagagacgtggacagcagtggctggtactactttgactactggggccaggga

SEQ ID NO: 8349 - protein, 43 aa, Artificial Sequence
  Description of Artificial Sequence: Synthetic antibody
ADKSTSTAYMELSSLRSEDTAVYYCARDVDSSGWYYFDYWGQG

SEQ ID NO: 8350 - protein, 17 aa, Artificial Sequence
  Description of Artificial Sequence: Synthetic antibody
CARDAREVKQYRGFDPW

SEQ ID NO: 8351 - DNA, 129 bp, Artificial Sequence
  Description of Artificial Sequence: Synthetic antibody
gacaacgccaagaactcgctgtatctgcaaatgaacagcctgagagccgaggacacggccgtgtattactgtgcgagagacgcgagagaggtaaagcagtaccgtgggttcgacccctggggccaggga

SEQ ID NO: 8352 - protein, 43 aa, Artificial Sequence
  Description of Artificial Sequence: Synthetic antibody
DNAKNSLYLQMNSLRAEDTAVYYCARDAREVKQYRGFDPWGQG

SEQ ID NO: 8353 - DNA, 129 bp, Artificial Sequence
  Description of Artificial Sequence: Synthetic antibody
gacaacgccaagaactcactgtatctgcaaatgaacagcctgagagccgaggacacggccgtgtattactgtgcgagagacgcgagagaggtaaagcagtaccgtgggttcgacccctggggccaggga

SEQ ID NO: 8354 - protein, 12 aa, Artificial Sequence
  Description of Artificial Sequence: Synthetic antibody
CIATVVSPLDYW

SEQ ID NO: 8355 - DNA, 129 bp, Artificial Sequence
  Description of Artificial Sequence: Synthetic antibody
ttcaccatctccatagattattcaaagaacacggcttttctacaaatgaacagcctggaaaccgaggacacggccgtgtattactgtattgctacggtggtaagcccgcttgactactggggccaggga

SEQ ID NO: 8356 - protein, 43 aa, Artificial Sequence
  Description of Artificial Sequence: Synthetic antibody
FTISIDYSKNTAFLQMNSLETEDTAVYYCIATVVSPLDYWGQG

SEQ ID NO: 8357 - DNA, 129 bp, Artificial Sequence
  Description of Artificial Sequence: Synthetic antibody
ttcaccatctccagagatgattcaaagaacacggcttttctacaaatgaacagcctggaaaccgaggacacggccgtgtattactgtattgctacggtggtaagcccgcttgactactggggccaggga

SEQ ID NO: 8358 - protein, 43 aa, Artificial Sequence
  Description of Artificial Sequence: Synthetic antibody
FTISRDDSKNTAFLQMNSLETEDTAVYYCIATVVSPLDYWGQG

SEQ ID NO: 8359 - protein, 20 aa, Artificial Sequence
  Description of Artificial Sequence: Synthetic antibody
CAREGLTTIAAAGENYFDYW

SEQ ID NO: 8360 - DNA, 129 bp, Artificial Sequence
  Description of Artificial Sequence: Synthetic antibody
acgagcacagcctacttggagctgaggagcctgagatctgacgacacggccgtgtattactgtgcgagagagggcctcacgacaatagcagcagctggggaaaactactttgactactggggccaggga

SEQ ID NO: 8361 - protein, 43 aa, Artificial Sequence
  Description of Artificial Sequence: Synthetic antibody
TSTAYLELRSLRSDDTAVYYCAREGLTTIAAAGENYFDYWGQG

SEQ ID NO: 8362 - DNA, 129 bp, Artificial Sequence
  Description of Artificial Sequence: Synthetic antibody
acgagcacagcctacatggagctgaggagcctgagatctgacgacacggccgtgtattactgtgcgagagagggcctcacgacaatagcagcagctggggaaaactactttgactactggggccaggga

SEQ ID NO: 8363 - protein, 43 aa, Artificial Sequence
  Description of Artificial Sequence: Synthetic antibody
TSTAYMELRSLRSDDTAVYYCAREGLTTIAAAGENYFDYWGQG

SEQ ID NO: 8364 - protein, 22 aa, Artificial Sequence
  Description of Artificial Sequence: Synthetic antibody
CAKVSPYSGSYYFYYYYGMDVW

SEQ ID NO: 8365 - DNA, 129 bp, Artificial Sequence
  Description of Artificial Sequence: Synthetic antibody
tcgatgtatctgcaaatgaacagcctgagagccgaggacacggccgtatattactgtgcgaaagtttcgccgtatagtgggagctactacttctactactactacggtatggacgtctggggccaaggg

SEQ ID NO: 8366 - protein, 43 aa, Artificial Sequence
  Description of Artificial Sequence: Synthetic antibody
SMYLQMNSLRAEDTAVYYCAKVSPYSGSYYFYYYYGMDVWGQG

SEQ ID NO: 8367 - DNA, 129 bp, Artificial Sequence
  Description of Artificial Sequence: Synthetic antibody
acgctgtatctgcaaatgaacagcctgagagccgaggacacggccgtatattactgtgcgaaagtttcgccgtatagtgggagctactacttctactactactacggtatggacgtctggggccaaggg

SEQ ID NO: 8368 - protein, 43 aa, Artificial Sequence
  Description of Artificial Sequence: Synthetic antibody
TLYLQMNSLRAEDTAVYYCAKVSPYSGSYYFYYYYGMDVWGQG

SEQ ID NO: 8369 - protein, 21 aa, Artificial Sequence
  Description of Artificial Sequence: Synthetic antibody
CAAQDAAMVAPGYYYYAMDVW

SEQ ID NO: 8370 - DNA, 129 bp, Artificial Sequence
  Description of Artificial Sequence: Synthetic antibody
tgcacagtctacttggagctgagcaggctgaaatttgacgacacggccgtgttttactgtgcggcccaggatgcagctatggttgcgccgggctactactactacgctatggacgtctggggccaaggg

SEQ ID NO: 8371 - protein, 43 aa, Artificial Sequence
  Description of Artificial Sequence: Synthetic antibody
CTVYLELSRLKFDDTAVFYCAAQDAAMVAPGYYYYAMDVWGQG

SEQ ID NO: 8372 - DNA, 129 bp, Artificial Sequence
  Description of Artificial Sequence: Synthetic antibody
agcacagtctacatggagctgagcaggctgaaatttgacgacacggccgtgttttactgtgcggcccaggatgcagctatggttgcgccgggctactactactacgctatggacgtctggggccaaggg

SEQ ID NO: 8373 - protein, 43 aa, Artificial Sequence
  Description of Artificial Sequence: Synthetic antibody
STVYMELSRLKFDDTAVFYCAAQDAAMVAPGYYYYAMDVWGQG

SEQ ID NO: 8374 - protein, 14 aa, Artificial Sequence
  Description of Artificial Sequence: Synthetic antibody
CAREDSGSNQFDYW

SEQ ID NO: 8375 - DNA, 129 bp, Artificial Sequence
  Description of Artificial Sequence: Synthetic antibody
atctccatacacaattccaagaacacgctgtatcttcaaatgaacagcctgagagccgaggacacggccgtgtattactgtgcgagagaggatagtgggagcaaccaatttgactactggggccaggga

SEQ ID NO: 8376 - protein, 43 aa, Artificial Sequence
  Description of Artificial Sequence: Synthetic antibody
ISIHNSKNTLYLQMNSLRAEDTAVYYCAREDSGSNQFDYWGQG

SEQ ID NO: 8377 - DNA, 129 bp, Artificial Sequence
  Description of Artificial Sequence: Synthetic antibody
atctccagagacaattccaagaacacgctgtatcttcaaatgaacagcctgagagccgaggacacggccgtgtattactgtgcgagagaggatagtgggagcaaccaatttgactactggggccaggga

SEQ ID NO: 8378 - protein, 43 aa, Artificial Sequence
  Description of Artificial Sequence: Synthetic antibody
ISRDNSKNTLYLQMNSLRAEDTAVYYCAREDSGSNQFDYWGQG

SEQ ID NO: 8379 - protein, 19 aa, Artificial Sequence
  Description of Artificial Sequence: Synthetic antibody
CAHTAEFGGVIVEYYFDYW

SEQ ID NO: 8380 - DNA, 129 bp, Artificial Sequence
  Description of Artificial Sequence: Synthetic antibody
tccaaaaaccaggtggtccttacaatgaccaacatggaccctgtggacacagccacatattactgtgcacacacggccgaatttgggggagttatcgtagagtactactttgactactggggccaggga

SEQ ID NO: 8381 - protein, 43 aa, Artificial Sequence
  Description of Artificial Sequence: Synthetic antibody
SKNQVVLTMTNMDPVDTATYYCAHTAEFGGVIVEYYFDYWGQG

SEQ ID NO: 8382 - DNA, 129 bp, Artificial Sequence
  Description of Artificial Sequence: Synthetic antibody
ctccaaaaccaggtggtccttacaatgaccaacatggaccctgtggacacagccacatattactgtgcacacacggccgaatttgggggagttatcgtagagtactactttgactactggggccaggga

SEQ ID NO: 8383 - protein, 43 aa, Artificial Sequence
  Description of Artificial Sequence: Synthetic antibody
LQNQVVLTMTNMDPVDTATYYCAHTAEFGGVIVEYYFDYWGQG

SEQ ID NO: 8384 - protein, 16 aa, Artificial Sequence
  Description of Artificial Sequence: Synthetic antibody
CAKDLRYYYDSSGVDW

SEQ ID NO: 8385 - DNA, 129 bp, Artificial Sequence
  Description of Artificial Sequence: Synthetic antibody
agagataattccaagaacacgctgtatctgcaaatgaacagcctgagagccgaggacgcggccgtatattactgtgcgaaagatctgaggtattactatgatagtagtggggtcgactggggccaggga

SEQ ID NO: 8386 - protein, 43 aa, Artificial Sequence
  Description of Artificial Sequence: Synthetic antibody
RDNSKNTLYLQMNSLRAEDAAVYYCAKDLRYYYDSSGVDWGQG

SEQ ID NO: 8387 - DNA, 129 bp, Artificial Sequence
  Description of Artificial Sequence: Synthetic antibody
agagataattccaagaacacgctgtatctgcaaatgaacagcctgagagccgaggacacggccgtatattactgtgcgaaagatctgaggtattactatgatagtagtggggtcgactggggccaggga

SEQ ID NO: 8388 - protein, 43 aa, Artificial Sequence
  Description of Artificial Sequence: Synthetic antibody
RDNSKNTLYLQMNSLRAEDTAVYYCAKDLRYYYDSSGVDWGQG

SEQ ID NO: 8389 - protein, 15 aa, Artificial Sequence
  Description of Artificial Sequence: Synthetic antibody
CAKDEDSGYGWFDYW

SEQ ID NO: 8390 - DNA, 129 bp, Artificial Sequence
  Description of Artificial Sequence: Synthetic antibody
tccagagacaattccaagaacacgctgtatctgcaaatgaacagcctgagagccgaggacacggctgtgtattactgtgcgaaagatgaggatagtggctacggatggtttgactactggggccaggga

SEQ ID NO: 8391 - protein, 43 aa, Artificial Sequence
  Description of Artificial Sequence: Synthetic antibody
SRDNSKNTLYLQMNSLRAEDTAVYYCAKDEDSGYGWFDYWGQG

SEQ ID NO: 8392 - DNA, 129 bp, Artificial Sequence
  Description of Artificial Sequence: Synthetic antibody
tccagagacaattccaagaacacgctgtatctgcaaatgaacagcctgagagccgaggacacggctgtgtactactgtgcgaaagatgaggatagtggctacggatggtttgactactggggccaggga

SEQ ID NO: 8393 - protein, 25 aa, Artificial Sequence
  Description of Artificial Sequence: Synthetic antibody
CARAVAGSITMVRELPPYYYGMDVW

SEQ ID NO: 8394 - DNA, 129 bp, Artificial Sequence
  Description of Artificial Sequence: Synthetic antibody
ttggagctgagctggctgagatctgacgacacggccgtgtattactgtgcgagagcagtggctgggagtattactatggttcgggaactacccccctactactacggtatggacgtctggggccaaggg

SEQ ID NO: 8395 - protein, 43 aa, Artificial Sequence
  Description of Artificial Sequence: Synthetic antibody
LELSWLRSDDTAVYYCARAVAGSITMVRELPPYYYGMDVWGQG

SEQ ID NO: 8396 - DNA, 129 bp, Artificial Sequence
  Description of Artificial Sequence: Synthetic antibody
atggagctgagcaggctgagatctgacgacacggccgtgtattactgtgcgagagcagtggctgggagtattactatggttcgggaactacccccctactactacggtatggacgtctggggccaaggg

SEQ ID NO: 8397 - protein, 43 aa, Artificial Sequence
  Description of Artificial Sequence: Synthetic antibody
MELSRLRSDDTAVYYCARAVAGSITMVRELPPYYYGMDVWGQG

SEQ ID NO: 8398 - protein, 15 aa, Artificial Sequence
  Description of Artificial Sequence: Synthetic antibody
CARRGTGADDAFDIW

SEQ ID NO: 8399 - DNA, 129 bp, Artificial Sequence
  Description of Artificial Sequence: Synthetic antibody
tcagccgacaggtccatcagcaccgcctacctgcagtggagcagcctgaaggcctcggacaccgccatgtatcactgtgcgagacggggaactggagcagatgatgcttttgatatctggggccaaggg

SEQ ID NO: 8400 - protein, 43 aa, Artificial Sequence
  Description of Artificial Sequence: Synthetic antibody
SADRSISTAYLQWSSLKASDTAMYHCARRGTGADDAFDIWGQG

SEQ ID NO: 8401 - DNA, 129 bp, Artificial Sequence
  Description of Artificial Sequence: Synthetic antibody
tcagccgacaagtccatcagcaccgcctacctgcagtggagcagcctgaaggcctcggacaccgccatgtattactgtgcgagacggggaactggagcagatgatgcttttgatatctggggccaaggg

SEQ ID NO: 8402 - protein, 43 aa, Artificial Sequence
  Description of Artificial Sequence: Synthetic antibody
SADKSISTAYLQWSSLKASDTAMYYCARRGTGADDAFDIWGQG

SEQ ID NO: 8403 - protein, 17 aa, Artificial Sequence
  Description of Artificial Sequence: Synthetic antibody
CARAPDYYGSGRHFDYW

SEQ ID NO: 8404 - DNA, 129 bp, Artificial Sequence
  Description of Artificial Sequence: Synthetic antibody
gacacctccaaaaaccaggtggtcctttcaatgaccaacatggaccctgtggacacagccacatattactgtgcacgcgccccggattactatggttcggggagacactttgactactggggccaggga

SEQ ID NO: 8405 - protein, 43 aa, Artificial Sequence
  Description of Artificial Sequence: Synthetic antibody
DTSKNQVVLSMTNMDPVDTATYYCARAPDYYGSGRHFDYWGQG

SEQ ID NO: 8406 - DNA, 129 bp, Artificial Sequence
  Description of Artificial Sequence: Synthetic antibody
ggacacctccaaaaccaggtggtcctttcaatgaccaacatggaccctgtggacacagccacatattactgtgcacgcgccccggattactatggttcggggagacactttgactactggggccaggga

SEQ ID NO: 8407 - protein, 43 aa, Artificial Sequence
  Description of Artificial Sequence: Synthetic antibody
GHLQNQVVLSMTNMDPVDTATYYCARAPDYYGSGRHFDYWGQG

SEQ ID NO: 8408 - protein, 13 aa, Artificial Sequence
  Description of Artificial Sequence: Synthetic antibody
CARLNDTSSFDYW

SEQ ID NO: 8409 - DNA, 129 bp, Artificial Sequence
  Description of Artificial Sequence: Synthetic antibody
accatcagcccagacacatccaagaaccagttctccctgcagctgaactctgtgactcccgaggacacggctgtttattattgtgcaagacttaatgacacctcgtcctttgactactggggcctggga

SEQ ID NO: 8410 - protein, 43 aa, Artificial Sequence
  Description of Artificial Sequence: Synthetic antibody
TISPDTSKNQFSLQLNSVTPEDTAVYYCARLNDTSSFDYWGLG

SEQ ID NO: 8411 - DNA, 129 bp, Artificial Sequence
  Description of Artificial Sequence: Synthetic antibody
accatcaacccagacacatccaagaaccagttctccctgcagctgaactctgtgactcccgaggacacggctgtgtatttttgtgcaagacttaatgacacctcgtcctttgactactggggcctggga

SEQ ID NO: 8412 - protein, 43 aa, Artificial Sequence
  Description of Artificial Sequence: Synthetic antibody
TINPDTSKNQFSLQLNSVTPEDTAVYFCARLNDTSSFDYWGLG

SEQ ID NO: 8413 - protein, 16 aa, Artificial Sequence
  Description of Artificial Sequence: Synthetic antibody
CAKGYDFWSHYQNDCW

SEQ ID NO: 8414 - DNA, 129 bp, Artificial Sequence
  Description of Artificial Sequence: Synthetic antibody
agagacaattccaagaacacgctatatctacaaatgaacagcctgagagccgaggacacggccctatattactgtgcgaaaggatacgatttttggagtcattatcaaaatgactgctggggccaggga

SEQ ID NO: 8415 - protein, 43 aa, Artificial Sequence
  Description of Artificial Sequence: Synthetic antibody
RDNSKNTLYLQMNSLRAEDTALYYCAKGYDFWSHYQNDCWGQG

SEQ ID NO: 8416 - DNA, 129 bp, Artificial Sequence
  Description of Artificial Sequence: Synthetic antibody
agagacaattccaacaacacgatatatctacaaatgaacagcctgagagccgaggacacggccctatattactgtgcgaaaggatacgatttttggagtcattatcaaaatgactgctggggccaggga

SEQ ID NO: 8417 - protein, 43 aa, Artificial Sequence
  Description of Artificial Sequence: Synthetic antibody
RDNSNNTIYLQMNSLRAEDTALYYCAKGYDFWSHYQNDCWGQG

SEQ ID NO: 8418 - protein, 13 aa, Artificial Sequence
  Description of Artificial Sequence: Synthetic antibody
CGRGSFPSSSAFW

SEQ ID NO: 8419 - DNA, 129 bp, Artificial Sequence
  Description of Artificial Sequence: Synthetic antibody
tacatatcacttgacacgtccaagaaccagttctccctgaacctgacctctgtgaccgccgcggacacggccgtgtattattgtgggagagggtcatttccatcaagttctgccttctggggccaggga

SEQ ID NO: 8420 - protein, 43 aa, Artificial Sequence
  Description of Artificial Sequence: Synthetic antibody
YISLDTSKNQFSLNLTSVTAADTAVYYCGRGSFPSSSAFWGQG

SEQ ID NO: 8421 - DNA, 129 bp, Artificial Sequence
  Description of Artificial Sequence: Synthetic antibody
accatatcacttgacacgtccaagaaccagttctccctgaacctgacctctgtgaccgccgcggacacggccgtgtattattgtgggagagggtcatttccatcaagttctgccttctggggccaggga

SEQ ID NO: 8422 - protein, 43 aa, Artificial Sequence
  Description of Artificial Sequence: Synthetic antibody
TISLDTSKNQFSLNLTSVTAADTAVYYCGRGSFPSSSAFWGQG

SEQ ID NO: 8423 - protein, 14 aa, Artificial Sequence
  Description of Artificial Sequence: Synthetic antibody
CAHRLNGGGGFDYW

SEQ ID NO: 8424 - DNA, 129 bp, Artificial Sequence
  Description of Artificial Sequence: Synthetic antibody
catcaccaaggacacctccaaaaccaggtggtcctcagaatgaccaacatggaccctgtggacacagccacatattactgtgcacacagacttaatggtggaggcggctttgactactggggccaggga

SEQ ID NO: 8425 - protein, 43 aa, Artificial Sequence
  Description of Artificial Sequence: Synthetic antibody
HHQGHLQNQVVLRMTNMDPVDTATYYCAHRLNGGGGFDYWGQG

SEQ ID NO: 8426 - DNA, 129 bp, Artificial Sequence
  Description of Artificial Sequence: Synthetic antibody
atcaccaaggacacctccaaaaaccaggtggtcctcagaatgaccaacatggaccctgtggacacagccacatattactgtgcacacagacttaatggtggaggcggctttgactactggggccaggga

SEQ ID NO: 8427 - protein, 43 aa, Artificial Sequence
  Description of Artificial Sequence: Synthetic antibody
ITKDTSKNQVVLRMTNMDPVDTATYYCAHRLNGGGGFDYWGQG

SEQ ID NO: 8428 - protein, 20 aa, Artificial Sequence
  Description of Artificial Sequence: Synthetic antibody
CVRDSFLVEQVAPSWGCDHW

SEQ ID NO: 8429 - DNA, 129 bp, Artificial Sequence
  Description of Artificial Sequence: Synthetic antibody
caaaacacgcagtttctgcaaatgagcaacctgagagtcgaaggctccgctgtgtatttctgtgtgagagatagttttttggtcgaacaagtggcgccctcctgggggtgtgaccactggggcctggga

SEQ ID NO: 8430 - protein, 43 aa, Artificial Sequence
  Description of Artificial Sequence: Synthetic antibody
QNTQFLQMSNLRVEGSAVYFCVRDSFLVEQVAPSWGCDHWGLG

SEQ ID NO: 8431 - DNA, 129 bp, Artificial Sequence
  Description of Artificial Sequence: Synthetic antibody
caaaacacgcagtttctgcaaatgagcaacctgagagtcgaagactccgctgtgtatttctgtgtgagagatagttttttggtcgaacaagtggcgccctcctgggggtgtgaccactggggcctggga

SEQ ID NO: 8432 - protein, 43 aa, Artificial Sequence
  Description of Artificial Sequence: Synthetic antibody
QNTQFLQMSNLRVEDSAVYFCVRDSFLVEQVAPSWGCDHWGLG

SEQ ID NO: 8433 - protein, 17 aa, Artificial Sequence
  Description of Artificial Sequence: Synthetic antibody
CARGDYSNYAVMGLGYW

SEQ ID NO: 8434 - DNA, 129 bp, Artificial Sequence
  Description of Artificial Sequence: Synthetic antibody
gacaattccaagaacacgctgtatcttcaaatgaacagcctgagagccgaggacacggccgtgtattactgtgcgaggggggactacagtaactacgctgtgatggggttgggctactggggccaggga

SEQ ID NO: 8435 - protein, 43 aa, Artificial Sequence
  Description of Artificial Sequence: Synthetic antibody
DNSKNTLYLQMNSLRAEDTAVYYCARGDYSNYAVMGLGYWGQG

SEQ ID NO: 8436 - DNA, 129 bp, Artificial Sequence
  Description of Artificial Sequence: Synthetic antibody
gacaattccaacaacacgctgtatcttcaaatgaacagcctgagagccgaggacacggccgtgtattactgtgcgaggggggactacagtaactacgctgtgatggggttgggctactggggccaggga

SEQ ID NO: 8437 - protein, 43 aa, Artificial Sequence
  Description of Artificial Sequence: Synthetic antibody
DNSNNTLYLQMNSLRAEDTAVYYCARGDYSNYAVMGLGYWGQG

SEQ ID NO: 8438 - protein, 18 aa, Artificial Sequence
  Description of Artificial Sequence: Synthetic antibody
CAKGDSGSYYGSSHFDYW

SEQ ID NO: 8439 - DNA, 129 bp, Artificial Sequence
  Description of Artificial Sequence: Synthetic antibody
aacgccaagaactccctgtatctgcaaatgagcagtctgagagctgaggacacggccttgtattactgtgcaaaaggggatagtgggagctactacgggtcgtcccactttgactactggggccaggga

SEQ ID NO: 8440 - protein, 43 aa, Artificial Sequence
  Description of Artificial Sequence: Synthetic antibody
NAKNSLYLQMSSLRAEDTALYYCAKGDSGSYYGSSHFDYWGQG

SEQ ID NO: 8441 - DNA, 129 bp, Artificial Sequence
  Description of Artificial Sequence: Synthetic antibody
aacgccaagaactccctgtatctgcaaatgaacagtctgagagctgaggacacggccttgtattactgtgcaaaaggggatagtgggagctactacgggtcgtcccactttgactactggggccaggga

SEQ ID NO: 8442 - protein, 43 aa, Artificial Sequence
  Description of Artificial Sequence: Synthetic antibody
NAKNSLYLQMNSLRAEDTALYYCAKGDSGSYYGSSHFDYWGQG

SEQ ID NO: 8443 - protein, 24 aa, Artificial Sequence
  Description of Artificial Sequence: Synthetic antibody
CAKDGRGYSSSWYGYDYYYGMDVW

SEQ ID NO: 8444 - DNA, 129 bp, Artificial Sequence
  Description of Artificial Sequence: Synthetic antibody
tatctgcaaatgaacagcctgagagccgaggacacggctgtgtattactgtgcgaaagatgggagggggtatagcagcagctggtatggttacgactactactacggtatggacgtctggggccaaggg

SEQ ID NO: 8445 - protein, 43 aa, Artificial Sequence
  Description of Artificial Sequence: Synthetic antibody
YLQMNSLRAEDTAVYYCAKDGRGYSSSWYGYDYYYGMDVWGQG

SEQ ID NO: 8446 - DNA, 129 bp, Artificial Sequence
  Description of Artificial Sequence: Synthetic antibody
tatctgcaaatgaacagcccgagagccgaagacacggctgtgtattactgtgcgaaagatgggagggggtatagcagcagctggtatggttacgactactactacggtatggacgtctggggccaaggg

SEQ ID NO: 8447 - protein, 43 aa, Artificial Sequence
  Description of Artificial Sequence: Synthetic antibody
YLQMNSPRAEDTAVYYCAKDGRGYSSSWYGYDYYYGMDVWGQG

SEQ ID NO: 8448 - protein, 16 aa, Artificial Sequence
  Description of Artificial Sequence: Synthetic antibody
CARLFSREGLDAFDIW

SEQ ID NO: 8449 - DNA, 129 bp, Artificial Sequence
  Description of Artificial Sequence: Synthetic antibody
gccgacaagtccatcagcaccgcctacctgcagtggagcagcctgaaggcctcggacaccgccatgtattactgtgcgagacttttttctcgggaggggttagatgcttttgatatctggggccaaggg

SEQ ID NO: 8450 - protein, 43 aa, Artificial Sequence
  Description of Artificial Sequence: Synthetic antibody
ADKSISTAYLQWSSLKASDTAMYYCARLFSREGLDAFDIWGQG

SEQ ID NO: 8451 - protein, 21 aa, Artificial Sequence
  Description of Artificial Sequence: Synthetic antibody
CAAATSGFLEWLSPPTNLDYW

SEQ ID NO: 8452 - DNA, 129 bp, Artificial Sequence
  Description of Artificial Sequence: Synthetic antibody
tgcacagcctacatggagctgaggagcctgagatctgacgacacggccgtgtattactgtgcggccgcgacatccggatttttggagtggttatccccccccacaaatcttgactactggggccaggga

SEQ ID NO: 8453 - protein, 43 aa, Artificial Sequence
  Description of Artificial Sequence: Synthetic antibody
CTAYMELRSLRSDDTAVYYCAAATSGFLEWLSPPTNLDYWGQG

SEQ ID NO: 8454 - DNA, 129 bp, Artificial Sequence
  Description of Artificial Sequence: Synthetic antibody
agcacagcctacatggagctgaggagcctgagatctgacgacacggccgtgtattactgtgcggccgcgacatccggatttttggagtggttatccccccccacaaatcttgactactggggccaggga

SEQ ID NO: 8455 - protein, 43 aa, Artificial Sequence
  Description of Artificial Sequence: Synthetic antibody
STAYMELRSLRSDDTAVYYCAAATSGFLEWLSPPTNLDYWGQG

SEQ ID NO: 8456 - protein, 18 aa, Artificial Sequence
  Description of Artificial Sequence: Synthetic antibody
CARPRAPTTNYYYGMDVW

SEQ ID NO: 8457 - DNA, 129 bp, Artificial Sequence
  Description of Artificial Sequence: Synthetic antibody
acctctgtcagcacggcatatctgcagatcagcagcctaaaggctgaggacactgccgtgtattactgtgcgaggccacgggcacctaccacaaactactactacggtatggacgtctggggccaaggg

SEQ ID NO: 8458 - protein, 43 aa, Artificial Sequence
  Description of Artificial Sequence: Synthetic antibody
TSVSTAYLQISSLKAEDTAVYYCARPRAPTTNYYYGMDVWGQG

SEQ ID NO: 8459 - DNA, 129 bp, Artificial Sequence
  Description of Artificial Sequence: Synthetic antibody
acctctgtcagcacggcatatctgcagatcagcagcctaaaggctgaggacactgccgtgtattactgtgcgaggccacgggcacctaccacaaactactactacggtatggacgtctggagccaaggg

SEQ ID NO: 8460 - protein, 43 aa, Artificial Sequence
  Description of Artificial Sequence: Synthetic antibody
TSVSTAYLQISSLKAEDTAVYYCARPRAPTTNYYYGMDVWSQG

SEQ ID NO: 8461 - protein, 15 aa, Artificial Sequence
  Description of Artificial Sequence: Synthetic antibody
CAREWESIAARFDLW

SEQ ID NO: 8462 - DNA, 129 bp, Artificial Sequence
  Description of Artificial Sequence: Synthetic antibody
ttggcggacaaggccacgaccacagtctacatggaattcaaaagtctgagatctgaggacacggccgtttatttctgtgcgagagagtgggagagcatagcagctcgctttgacctctggggccaggga

SEQ ID NO: 8463 - protein, 43 aa, Artificial Sequence
  Description of Artificial Sequence: Synthetic antibody
LADKATTTVYMEFKSLRSEDTAVYFCAREWESIAARFDLWGQG

SEQ ID NO: 8464 - DNA, 129 bp, Artificial Sequence
  Description of Artificial Sequence: Synthetic antibody
atggcggacaaggccacgaccacagtctacatggaattcaaaagtctgagatctgaggacacggccgtttatttctgtgcgagagagtgggagagcatagcagctcgctttgacctctggggccaggga

SEQ ID NO: 8465 - protein, 43 aa, Artificial Sequence
  Description of Artificial Sequence: Synthetic antibody
MADKATTTVYMEFKSLRSEDTAVYFCAREWESIAARFDLWGQG

SEQ ID NO: 8466 - protein, 16 aa, Artificial Sequence
  Description of Artificial Sequence: Synthetic antibody
CARGALLEWLSRFDNW

SEQ ID NO: 8467 - DNA, 129 bp, Artificial Sequence
  Description of Artificial Sequence: Synthetic antibody
gtagacacgtccaagaacctgttctccctgaagctgagctctgtgaccgccgcggacacggccgtatattactgtgcgagaggtgcacttttggagtggttatcccgctttgacaactggggccaggga

SEQ ID NO: 8468 - protein, 43 aa, Artificial Sequence
  Description of Artificial Sequence: Synthetic antibody
VDTSKNLFSLKLSSVTAADTAVYYCARGALLEWLSRFDNWGQG

SEQ ID NO: 8469 - DNA, 129 bp, Artificial Sequence
  Description of Artificial Sequence: Synthetic antibody
gtagacacgtccaagaaccagttctccctgaagctgagctctgtgaccgccgcggacacggccgtatattactgtgcgagaggtgcacttttggagtggttatcccgctttgacaactggggccaggga

SEQ ID NO: 8470 - protein, 43 aa, Artificial Sequence
  Description of Artificial Sequence: Synthetic antibody
VDTSKNQFSLKLSSVTAADTAVYYCARGALLEWLSRFDNWGQG

SEQ ID NO: 8471 - protein, 21 aa, Artificial Sequence
  Description of Artificial Sequence: Synthetic antibody
CARGQADPMLGIYRPFVFDYW

SEQ ID NO: 8472 - DNA, 129 bp, Artificial Sequence
  Description of Artificial Sequence: Synthetic antibody
tcccagttctccctggaggtgacttctgtgaccgccacggacacggctgtttattactgtgcgagaggccaagcggaccccatgttggggatataccgcccgttcgtctttgactactggggccaggga

SEQ ID NO: 8473 - protein, 43 aa, Artificial Sequence
  Description of Artificial Sequence: Synthetic antibody
SQFSLEVTSVTATDTAVYYCARGQADPMLGIYRPFVFDYWGQG

SEQ ID NO: 8474 - DNA, 129 bp, Artificial Sequence
  Description of Artificial Sequence: Synthetic antibody
acccagttctccctggaggtgacttctgtgaccgccacggacacggctgtttattactgtgcgagaggccaagcggaccccatgttggggatataccgcccgttcgtctttgactactggggccaggga

SEQ ID NO: 8475 - protein, 43 aa, Artificial Sequence
  Description of Artificial Sequence: Synthetic antibody
TQFSLEVTSVTATDTAVYYCARGQADPMLGIYRPFVFDYWGQG

SEQ ID NO: 8476 - protein, 18 aa, Artificial Sequence
  Description of Artificial Sequence: Synthetic antibody
CARGIVVIPAANPDFDYW

SEQ ID NO: 8477 - DNA, 129 bp, Artificial Sequence
  Description of Artificial Sequence: Synthetic antibody
acctccaaaaaccaggtggcccttacaatgaccaacatggaccctgtggacacagccacatattactgtgcacgcggtattgtagtaataccagctgctaatcccgactttgactactggggccaggga

SEQ ID NO: 8478 - protein, 43 aa, Artificial Sequence
  Description of Artificial Sequence: Synthetic antibody
TSKNQVALTMTNMDPVDTATYYCARGIVVIPAANPDFDYWGQG

SEQ ID NO: 8479 - DNA, 129 bp, Artificial Sequence
  Description of Artificial Sequence: Synthetic antibody
cacctccaaaaaccaggtggccctacaatgaccaacatggaccctgtggacacagccacatattactgtgcacgcggtattgtagtaataccagctgctaatcccgactttgactactggggccaggga

SEQ ID NO: 8480 - protein, 43 aa, Artificial Sequence
  Description of Artificial Sequence: Synthetic antibody
HLQKPGGPTMTNMDPVDTATYYCARGIVVIPAANPDFDYWGQG

SEQ ID NO: 8481 - protein, 14 aa, Artificial Sequence
  Description of Artificial Sequence: Synthetic antibody
CAKGGYRQGYFDYW

SEQ ID NO: 8482 - DNA, 129 bp, Artificial Sequence
  Description of Artificial Sequence: Synthetic antibody
atctccatatatgattccaagaacacgctgtatctgcaaatgaacagcctgagagccgaggacacggccgtatattactgtgcgaaaggcggctaccgacaggggtactttgactactggggccaggga

SEQ ID NO: 8483 - protein, 43 aa, Artificial Sequence
  Description of Artificial Sequence: Synthetic antibody
ISIYDSKNTLYLQMNSLRAEDTAVYYCAKGGYRQGYFDYWGQG

SEQ ID NO: 8484 - DNA, 129 bp, Artificial Sequence
  Description of Artificial Sequence: Synthetic antibody
atctccagagatgattccaagaacacgctgtatctgcaaatgaacagcctgagagccgaggacacggccgtatattactgtgcgaaaggcggctaccgacaggggtactttgactactggggccaggga

SEQ ID NO: 8485 - protein, 43 aa, Artificial Sequence
  Description of Artificial Sequence: Synthetic antibody
ISRDDSKNTLYLQMNSLRAEDTAVYYCAKGGYRQGYFDYWGQG

SEQ ID NO: 8486 - protein, 20 aa, Artificial Sequence
  Description of Artificial Sequence: Synthetic antibody
CAKSGGASCCTNGGDWFDPW

SEQ ID NO: 8487 - DNA, 129 bp, Artificial Sequence
  Description of Artificial Sequence: Synthetic antibody
aagaactccctgtatctgcaaatgaacggtctgagagctgaggacacggccttgtattactgtgcaaaatcaggcggtgccagctgctgcacaaacgggggggactggttcgacccctggggccaggga

SEQ ID NO: 8488 - protein, 43 aa, Artificial Sequence
  Description of Artificial Sequence: Synthetic antibody
KNSLYLQMNGLRAEDTALYYCAKSGGASCCTNGGDWFDPWGQG

SEQ ID NO: 8489 - DNA, 129 bp, Artificial Sequence
  Description of Artificial Sequence: Synthetic antibody
aagaactccctgtatctgcaaatgaacagtctgagagctgaggacacggccttgtattactgtgcaaaatcaggcggtgccagctgctgcacaaacgggggggactggttcgacccctggggccaggga

SEQ ID NO: 8490 - protein, 43 aa, Artificial Sequence
  Description of Artificial Sequence: Synthetic antibody
KNSLYLQMNSLRAEDTALYYCAKSGGASCCTNGGDWFDPWGQG

SEQ ID NO: 8491 - protein, 21 aa, Artificial Sequence
  Description of Artificial Sequence: Synthetic antibody
CARVGYDFWSGLSPDYGMDVW

SEQ ID NO: 8492 - DNA, 129 bp, Artificial Sequence
  Description of Artificial Sequence: Synthetic antibody
tgcacagtctacttggagctgagcagcctgagatctgaggacacggccgtgtattactgtgcgagagtaggttacgatttttggagtggcctcagccccgactacggtatggacgtctggggccaaggg

SEQ ID NO: 8493 - protein, 43 aa, Artificial Sequence
  Description of Artificial Sequence: Synthetic antibody
CTVYLELSSLRSEDTAVYYCARVGYDFWSGLSPDYGMDVWGQG

SEQ ID NO: 8494 - DNA, 129 bp, Artificial Sequence
  Description of Artificial Sequence: Synthetic antibody
agcacagtctacatggagctgagcagcctgagatctgaggacacggccgtgtattactgtgcgagagtaggttacgatttttggagtggcctcagccccgactacggtatggacgtctggggccaaggg

SEQ ID NO: 8495 - protein, 43 aa, Artificial Sequence
  Description of Artificial Sequence: Synthetic antibody
STVYMELSSLRSEDTAVYYCARVGYDFWSGLSPDYGMDVWGQG

SEQ ID NO: 8496 - protein, 16 aa, Artificial Sequence
  Description of Artificial Sequence: Synthetic antibody
CARLSVIAAAGTVDYW

SEQ ID NO: 8497 - DNA, 129 bp, Artificial Sequence
  Description of Artificial Sequence: Synthetic antibody
tgggacaacgccaagagctcactgtatctgcaaatgaacagcctgagagccgaggacacggccgtgtattactgtgccagattatctgttatagcagcagctggtaccgttgactactggggccaggga

SEQ ID NO: 8498 - protein, 43 aa, Artificial Sequence
  Description of Artificial Sequence: Synthetic antibody
WDNAKSSLYLQMNSLRAEDTAVYYCARLSVIAAAGTVDYWGQG

SEQ ID NO: 8499 - DNA, 129 bp, Artificial Sequence
  Description of Artificial Sequence: Synthetic antibody
agggacaacgccaagagctcactgtatctgcaaatgaacagcctgagagccgaggacacggccgtgtattactgtgccagattatctgttatagcagcagctggtaccgttgactactggggccaggga

SEQ ID NO: 8500 - protein, 43 aa, Artificial Sequence
  Description of Artificial Sequence: Synthetic antibody
RDNAKSSLYLQMNSLRAEDTAVYYCARLSVIAAAGTVDYWGQG

SEQ ID NO: 8501 - protein, 13 aa, Artificial Sequence
  Description of Artificial Sequence: Synthetic antibody
CASLSRGYRFDYW

SEQ ID NO: 8502 - DNA, 129 bp, Artificial Sequence
  Description of Artificial Sequence: Synthetic antibody
accattacccggcacacatccgcgagcacagcctacatggagctgagcagcctgagatctgaagacacggctgtgtattactgtgcgagtcttagtcgtggttatcggtttgactactggggccaggga

SEQ ID NO: 8503 - protein, 43 aa, Artificial Sequence
  Description of Artificial Sequence: Synthetic antibody
TITRHTSASTAYMELSSLRSEDTAVYYCASLSRGYRFDYWGQG

SEQ ID NO: 8504 - DNA, 129 bp, Artificial Sequence
  Description of Artificial Sequence: Synthetic antibody
accattaccagggacacatccgcgagcacagcctacatggagctgagcagcctgagatctgaagacacggctgtgtattactgtgcgagtcttagtcgtggttatcggtttgactactggggccaggga

SEQ ID NO: 8505 - protein, 43 aa, Artificial Sequence
  Description of Artificial Sequence: Synthetic antibody
TITRDTSASTAYMELSSLRSEDTAVYYCASLSRGYRFDYWGQG

SEQ ID NO: 8506 - protein, 21 aa, Artificial Sequence
  Description of Artificial Sequence: Synthetic antibody
CAAEYCSGGSCYPPLDAFDIW

SEQ ID NO: 8507 - DNA, 129 bp, Artificial Sequence
  Description of Artificial Sequence: Synthetic antibody
agcactgcctacatggagctgagcagcctgagatctgaggacacggccgtgtattactgtgcggccgaatattgtagtggtggtagctgctaccccccccttgatgcttttgatatctggggccaaggg

SEQ ID NO: 8508 - protein, 43 aa, Artificial Sequence
  Description of Artificial Sequence: Synthetic antibody
STAYMELSSLRSEDTAVYYCAAEYCSGGSCYPPLDAFDIWGQG

SEQ ID NO: 8509 - DNA, 129 bp, Artificial Sequence
  Description of Artificial Sequence: Synthetic antibody
agcacagcctacatggagctgagcagcctgagatctgaggacacggccgtgtattactgtgcggccgaatattgtagtggtggtagctgctaccccccccttgatgcttttgatatctggggccaaggg

SEQ ID NO: 8510 - protein, 30 aa, Artificial Sequence
  Description of Artificial Sequence: Synthetic antibody
CAKDLVPYYYDSSGYYLVGFGAGNYGMDVW

SEQ ID NO: 8511 - DNA, 129 bp, Artificial Sequence
  Description of Artificial Sequence: Synthetic antibody
ctgagagccgaggacacggccgtatattactgtgcgaaagatctagtcccgtattactatgatagtagtggttattacttagtcgggttcggcgccgggaactacggtatggacgtctggggccagggg

SEQ ID NO: 8512 - protein, 43 aa, Artificial Sequence
  Description of Artificial Sequence: Synthetic antibody
LRAEDTAVYYCAKDLVPYYYDSSGYYLVGFGAGNYGMDVWGQG

SEQ ID NO: 8513 - DNA, 129 bp, Artificial Sequence
  Description of Artificial Sequence: Synthetic antibody
ctgagagccgaggacacggccgtatattactgtgcgaaagatctagtcccgtattactatgatagtagtggttattacttagtcgggttcggcgccgggaactacggtatggacgtctggggccaaggg

SEQ ID NO: 8514 - protein, 21 aa, Artificial Sequence
  Description of Artificial Sequence: Synthetic antibody
CAKDTSIEYSSSSGGGSFDYW

SEQ ID NO: 8515 - DNA, 129 bp, Artificial Sequence
  Description of Artificial Sequence: Synthetic antibody
aactccctgtatctgcaaatgaacagtctgagagctgaggacacggccttgtattactgtgcaaaagatacgagcatcgagtatagcagctcgtccggggggggtagttttgactactggggccaggga

SEQ ID NO: 8516 - protein, 43 aa, Artificial Sequence
  Description of Artificial Sequence: Synthetic antibody
NSLYLQMNSLRAEDTALYYCAKDTSIEYSSSSGGGSFDYWGQG

SEQ ID NO: 8517 - protein, 12 aa, Artificial Sequence
  Description of Artificial Sequence: Synthetic antibody
CAHGNPYYLDYW

SEQ ID NO: 8518 - DNA, 129 bp, Artificial Sequence
  Description of Artificial Sequence: Synthetic antibody
gctcaccatcaccaaggacacctccaaaaccaggtggtccttacaatgaccaacatggaccctgtggacacagccacatattactgtgcacacggtaatccctactaccttgactactggggccaggga

SEQ ID NO: 8519 - protein, 43 aa, Artificial Sequence
  Description of Artificial Sequence: Synthetic antibody
AHHHQGHLQNQVVLTMTNMDPVDTATYYCAHGNPYYLDYWGQG

SEQ ID NO: 8520 - DNA, 129 bp, Artificial Sequence
  Description of Artificial Sequence: Synthetic antibody
ctcaccatcaccaaggacacctccaaaaaccaggtggtccttacaatgaccaacatggaccctgtggacacagccacatattactgtgcacacggtaatccctactaccttgactactggggccaggga

SEQ ID NO: 8521 - protein, 43 aa, Artificial Sequence
  Description of Artificial Sequence: Synthetic antibody
LTITKDTSKNQVVLTMTNMDPVDTATYYCAHGNPYYLDYWGQG

SEQ ID NO: 8522 - protein, 12 aa, Artificial Sequence
  Description of Artificial Sequence: Synthetic antibody
CARQELWSFDYW

SEQ ID NO: 8523 - DNA, 129 bp, Artificial Sequence
  Description of Artificial Sequence: Synthetic antibody
gtcaccatctcagccgacaagtccatcagcaccgcctacctgcagtggagcagcctgaaggcctcggacaccgccatgtattactgtgcgagacaggagctatggtcctttgactactggggccaggga

SEQ ID NO: 8524 - protein, 43 aa, Artificial Sequence
  Description of Artificial Sequence: Synthetic antibody
VTISADKSISTAYLQWSSLKASDTAMYYCARQELWSFDYWGQG

SEQ ID NO: 8525 - DNA, 129 bp, Artificial Sequence
  Description of Artificial Sequence: Synthetic antibody
gccaccatctcagccgacaagtccatcagcaccgcctacctgcagtggagcagcctgaaggcctcggacaccgccatgtgttactgtgcgagacaggagctatggtcctttgactactggggccaggga

SEQ ID NO: 8526 - protein, 43 aa, Artificial Sequence
  Description of Artificial Sequence: Synthetic antibody
ATISADKSISTAYLQWSSLKASDTAMCYCARQELWSFDYWGQG

SEQ ID NO: 8527 - protein, 18 aa, Artificial Sequence
  Description of Artificial Sequence: Synthetic antibody
CARIRYLVGLGDFTHDYW

SEQ ID NO: 8528 - DNA, 129 bp, Artificial Sequence
  Description of Artificial Sequence: Synthetic antibody
acctccaaaaaccaggtggtccttacaatgaccaacatggaccctgtggacacagccacgtattactgtgcacggatacgttatttagtggggttgggggatttcacccatgactactggggccaggga

SEQ ID NO: 8529 - protein, 43 aa, Artificial Sequence
  Description of Artificial Sequence: Synthetic antibody
TSKNQVVLTMTNMDPVDTATYYCARIRYLVGLGDFTHDYWGQG

SEQ ID NO: 8530 - DNA, 129 bp, Artificial Sequence
  Description of Artificial Sequence: Synthetic antibody
cacctccaaaaccaggtggtccttacaatgaccaacatggaccctgtggacacagccacgtattactgtgcacggatacgttatttagtggggttgggggatttcacccatgactactggggccaggga

SEQ ID NO: 8531 - protein, 43 aa, Artificial Sequence
  Description of Artificial Sequence: Synthetic antibody
HLQNQVVLTMTNMDPVDTATYYCARIRYLVGLGDFTHDYWGQG

SEQ ID NO: 8532 - protein, 18 aa, Artificial Sequence
  Description of Artificial Sequence: Synthetic antibody
CAQKAGTAAEGYWYFDLW

SEQ ID NO: 8533 - DNA, 129 bp, Artificial Sequence
  Description of Artificial Sequence: Synthetic antibody
acctccaaaaaccaggtggtccttacaatgaccaacatggaccctgtggacacagccacatattactgtgcacagaaagctggtacagcggcggagggttactggtacttcgatctctggggccgtggc

SEQ ID NO: 8534 - protein, 43 aa, Artificial Sequence
  Description of Artificial Sequence: Synthetic antibody
TSKNQVVLTMTNMDPVDTATYYCAQKAGTAAEGYWYFDLWGRG

SEQ ID NO: 8535 - DNA, 129 bp, Artificial Sequence
  Description of Artificial Sequence: Synthetic antibody
cacctccaaaaccaggtggtccttacaatgaccaacatggaccctgtggacacagccacatattactgtgcacagaaagctggtacagcggcggagggttactggtacttcgatctctggggccgtggc

SEQ ID NO: 8536 - protein, 43 aa, Artificial Sequence
  Description of Artificial Sequence: Synthetic antibody
HLQNQVVLTMTNMDPVDTATYYCAQKAGTAAEGYWYFDLWGRG

SEQ ID NO: 8537 - protein, 16 aa, Artificial Sequence
  Description of Artificial Sequence: Synthetic antibody
CARDPHYDRGYGMDVW

SEQ ID NO: 8538 - DNA, 129 bp, Artificial Sequence
  Description of Artificial Sequence: Synthetic antibody
tgggacacgtccacgagcacagtctacatggagctgagcagcctgagatctgaggacacggccgtgtattactgtgcgagagatccccattacgaccgtggctacggtatggacgtctggggccaaggg

SEQ ID NO: 8539 - protein, 43 aa, Artificial Sequence
  Description of Artificial Sequence: Synthetic antibody
WDTSTSTVYMELSSLRSEDTAVYYCARDPHYDRGYGMDVWGQG

SEQ ID NO: 8540 - DNA, 129 bp, Artificial Sequence
  Description of Artificial Sequence: Synthetic antibody
agggacacgtccacgagcacagtctacatggagctgagcagcctgagatctgaggacacggccgtgtattactgtgcgagagatccccattacgaccgtggctacggtatggacgtctggggccaaggg

SEQ ID NO: 8541 - protein, 43 aa, Artificial Sequence
  Description of Artificial Sequence: Synthetic antibody
RDTSTSTVYMELSSLRSEDTAVYYCARDPHYDRGYGMDVWGQG

SEQ ID NO: 8542 - protein, 15 aa, Artificial Sequence
  Description of Artificial Sequence: Synthetic antibody
CAKGGYGSDYGLDYW

SEQ ID NO: 8543 - DNA, 129 bp, Artificial Sequence
  Description of Artificial Sequence: Synthetic antibody
tccagagataattccaagaacacgctgtatctgcaattgaacagcctgagagccgacgacacggccgtatattactgtgcgaaagggggctatggttcggactatggacttgactactggggccaggga

SEQ ID NO: 8544 - protein, 43 aa, Artificial Sequence
  Description of Artificial Sequence: Synthetic antibody
SRDNSKNTLYLQLNSLRADDTAVYYCAKGGYGSDYGLDYWGQG

SEQ ID NO: 8545 - DNA, 129 bp, Artificial Sequence
  Description of Artificial Sequence: Synthetic antibody
tccagagataattccaagaacacgctgcatctgcaattgaacagcctgagagccgacgacacggccgtatattactgtgcgaaagggggctatggttcggactatggacttgactactggggccaggga

SEQ ID NO: 8546 - protein, 43 aa, Artificial Sequence
  Description of Artificial Sequence: Synthetic antibody
SRDNSKNTLHLQLNSLRADDTAVYYCAKGGYGSDYGLDYWGQG

SEQ ID NO: 8547 - protein, 14 aa, Artificial Sequence
  Description of Artificial Sequence: Synthetic antibody
CARDRIAGDAFDIW

SEQ ID NO: 8548 - DNA, 129 bp, Artificial Sequence
  Description of Artificial Sequence: Synthetic antibody
atcaacccagacacatccaagaaccagttctccctgcagctgaactctgtgactcccgaggacacggctgtgtattactgtgcaagagatcgcatagcaggagatgcttttgatatctggggccaaggg

SEQ ID NO: 8549 - protein, 43 aa, Artificial Sequence
  Description of Artificial Sequence: Synthetic antibody
INPDTSKNQFSLQLNSVTPEDTAVYYCARDRIAGDAFDIWGQG

SEQ ID NO: 8550 - DNA, 129 bp, Artificial Sequence
  Description of Artificial Sequence: Synthetic antibody
atatcagtagacacgtccaagaaccagttctccctgcagctgaactctgtgactcccgaggacacggctgtgtattactgtgcaagagatcgcatagcaggagatgcttttgatatctggggccaaggg

SEQ ID NO: 8551 - protein, 43 aa, Artificial Sequence
  Description of Artificial Sequence: Synthetic antibody
ISVDTSKNQFSLQLNSVTPEDTAVYYCARDRIAGDAFDIWGQG

SEQ ID NO: 8552 - protein, 12 aa, Artificial Sequence
  Description of Artificial Sequence: Synthetic antibody
CARDLGQWPGYW

SEQ ID NO: 8553 - DNA, 129 bp, Artificial Sequence
  Description of Artificial Sequence: Synthetic antibody
ttcaccatctccagagacaattccaagaacacgctgtatcttcaaatgaacagcctgagagccgaggacacggccgtgtattactgtgcgagagacctagggcagtggcccggctactggggccaggga

SEQ ID NO: 8554 - protein, 43 aa, Artificial Sequence
  Description of Artificial Sequence: Synthetic antibody
FTISRDNSKNTLYLQMNSLRAEDTAVYYCARDLGQWPGYWGQG

SEQ ID NO: 8555 - DNA, 129 bp, Artificial Sequence
  Description of Artificial Sequence: Synthetic antibody
ttcaccatctccagacacaattccaagaacacgctgtatcttcaaatcaacagcctgagagccgaggacacggccgtgtattactgtgcgagagacctagggcagtggcccggctactggggccaggga

SEQ ID NO: 8556 - protein, 43 aa, Artificial Sequence
  Description of Artificial Sequence: Synthetic antibody
FTISRHNSKNTLYLQINSLRAEDTAVYYCARDLGQWPGYWGQG

SEQ ID NO: 8557 - protein, 10 aa, Artificial Sequence
  Description of Artificial Sequence: Synthetic antibody
CAKDLAMDYW

SEQ ID NO: 8558 - DNA, 129 bp, Artificial Sequence
  Description of Artificial Sequence: Synthetic antibody
ggccggttcaccatctccagatataattccaagaacacgctgtatctgcaaattaacagcctgagagccgaggacacggccgtatattactgtgcgaaagatctggcaatggactactggggccaggga

SEQ ID NO: 8559 - protein, 43 aa, Artificial Sequence
  Description of Artificial Sequence: Synthetic antibody
GRFTISRYNSKNTLYLQINSLRAEDTAVYYCAKDLAMDYWGQG

SEQ ID NO: 8560 - DNA, 129 bp, Artificial Sequence
  Description of Artificial Sequence: Synthetic antibody
ggccggttcaccatctccagagataattccaagaacacgctgtatctgcaaatgaacagcctgagagccgaggacacggccgtatattactgtgcgaaagatctggcaatggactactggggccaggga

SEQ ID NO: 8561 - protein, 43 aa, Artificial Sequence
  Description of Artificial Sequence: Synthetic antibody
GRFTISRDNSKNTLYLQMNSLRAEDTAVYYCAKDLAMDYWGQG

SEQ ID NO: 8562 - protein, 18 aa, Artificial Sequence
  Description of Artificial Sequence: Synthetic antibody
CAKIGARSTSGRGAFDIW

SEQ ID NO: 8563 - DNA, 129 bp, Artificial Sequence
  Description of Artificial Sequence: Synthetic antibody
aattctaagtacacgatgtatctgcaaatgaacagcctgagagcggaggacacggccgtatattactgtgcgaaaatcggggcacgtagtaccagcggcaggggtgcttttgatatctggggccaaggg

SEQ ID NO: 8564 - protein, 43 aa, Artificial Sequence
  Description of Artificial Sequence: Synthetic antibody
NSKYTMYLQMNSLRAEDTAVYYCAKIGARSTSGRGAFDIWGQG

SEQ ID NO: 8565 - DNA, 129 bp, Artificial Sequence
  Description of Artificial Sequence: Synthetic antibody
aattccaagaacacgctgtatctgcaaatgaacagcctgagagccgaggacacggccgtatattactgtgcgaaaatcggggcacgtagtaccagcggcaggggtgcttttgatatctggggccaaggg

SEQ ID NO: 8566 - protein, 43 aa, Artificial Sequence
  Description of Artificial Sequence: Synthetic antibody
NSKNTLYLQMNSLRAEDTAVYYCAKIGARSTSGRGAFDIWGQG

SEQ ID NO: 8567 - protein, 21 aa, Artificial Sequence
  Description of Artificial Sequence: Synthetic antibody
CAKDSYYYGSGSYYNDAFDIW

SEQ ID NO: 8568 - DNA, 129 bp, Artificial Sequence
  Description of Artificial Sequence: Synthetic antibody
aacacgctgtatctgcaaatgaacagcctgagagccgaggacacggccgtatattactgtgcgaaagattcgtattactatggttcggggagttattacaatgatgcttttgatatctggggccaaggg

SEQ ID NO: 8569 - protein, 43 aa, Artificial Sequence
  Description of Artificial Sequence: Synthetic antibody
NTLYLQMNSLRAEDTAVYYCAKDSYYYGSGSYYNDAFDIWGQG

SEQ ID NO: 8570 - DNA, 129 bp, Artificial Sequence
  Description of Artificial Sequence: Synthetic antibody
aacacgctgtatatgaaaatgaacagcctgagagccgaggacacggccgtatattactgtgcgaaagattcgtattactatggttcggggagttattacaatgatgcttttgatatctggggccaaggg

SEQ ID NO: 8571 - protein, 43 aa, Artificial Sequence
  Description of Artificial Sequence: Synthetic antibody
NTLYMKMNSLRAEDTAVYYCAKDSYYYGSGSYYNDAFDIWGQG

SEQ ID NO: 8572 - protein, 20 aa, Artificial Sequence
  Description of Artificial Sequence: Synthetic antibody
CARGGGAYCGSDCYRMLDYW

SEQ ID NO: 8573 - DNA, 129 bp, Artificial Sequence
  Description of Artificial Sequence: Synthetic antibody
gagaacacactctatcttcaaatgaacagcctgagagccgaggacacggccgtatattactgtgcgagaggtggcggggcatattgtggtagtgactgctatcgaatgcttgactactggggccacgga

SEQ ID NO: 8574 - protein, 43 aa, Artificial Sequence
  Description of Artificial Sequence: Synthetic antibody
ENTLYLQMNSLRAEDTAVYYCARGGGAYCGSDCYRMLDYWGHG

SEQ ID NO: 8575 - DNA, 129 bp, Artificial Sequence
  Description of Artificial Sequence: Synthetic antibody
gacaacacactctatcttcaaatcaacagcctgagagccgaggacacggccgtatattactgtgcgagaggtggcggggcatattgtggtagtgactgctatcgaatgcttgactactggggccacgga

SEQ ID NO: 8576 - protein, 43 aa, Artificial Sequence
  Description of Artificial Sequence: Synthetic antibody
DNTLYLQINSLRAEDTAVYYCARGGGAYCGSDCYRMLDYWGHG

SEQ ID NO: 8577 - protein, 20 aa, Artificial Sequence
  Description of Artificial Sequence: Synthetic antibody
CARGGEYCSGANCYSGFDYW

SEQ ID NO: 8578 - DNA, 129 bp, Artificial Sequence
  Description of Artificial Sequence: Synthetic antibody
aagaacaccctgtatcttcaaatgaacagcctgagagccgaggacacggccgtgtattactgtgcgagagggggggaatattgtagtggtgctaactgctactcaggatttgactactggggccaggga

SEQ ID NO: 8579 - protein, 43 aa, Artificial Sequence
  Description of Artificial Sequence: Synthetic antibody
KNTLYLQMNSLRAEDTAVYYCARGGEYCSGANCYSGFDYWGQG

SEQ ID NO: 8580 - DNA, 129 bp, Artificial Sequence
  Description of Artificial Sequence: Synthetic antibody
aacaacaccctgtatctacaaatgaacagcctgagagccgaggacacggccgtgtattactgtgcgagagggggggaatattgtagtggtgctaactgctactcaggatttgactactggggccaggga

SEQ ID NO: 8581 - protein, 43 aa, Artificial Sequence
  Description of Artificial Sequence: Synthetic antibody
NNTLYLQMNSLRAEDTAVYYCARGGEYCSGANCYSGFDYWGQG

SEQ ID NO: 8582 - protein, 22 aa, Artificial Sequence
  Description of Artificial Sequence: Synthetic antibody
CARVDIAAAGGYYYYYYGMDVW

SEQ ID NO: 8583 - DNA, 129 bp, Artificial Sequence
  Description of Artificial Sequence: Synthetic antibody
acagcctacatggagctgaggagcctgagatctgacgacacggccgtgtattactgtgcgagagtggatatagcagcagctggggggtattactactactactacggtatggacgtctggggccaaggg

SEQ ID NO: 8584 - protein, 43 aa, Artificial Sequence
  Description of Artificial Sequence: Synthetic antibody
TAYMELRSLRSDDTAVYYCARVDIAAAGGYYYYYYGMDVWGQG

SEQ ID NO: 8585 - DNA, 129 bp, Artificial Sequence
  Description of Artificial Sequence: Synthetic antibody
aaagcctacatggtgctgaggagcctgagatctgacgacacggccgtgtattactgtgcgagagtggatatagcagcagctggggggtattactactactactacggtatggacgtctggggccaaggg

SEQ ID NO: 8586 - protein, 43 aa, Artificial Sequence
  Description of Artificial Sequence: Synthetic antibody
KAYMVLRSLRSDDTAVYYCARVDIAAAGGYYYYYYGMDVWGQG

SEQ ID NO: 8587 - protein, 14 aa, Artificial Sequence
  Description of Artificial Sequence: Synthetic antibody
CTPSNRGVIIFAYW

SEQ ID NO: 8588 - DNA, 129 bp, Artificial Sequence
  Description of Artificial Sequence: Synthetic antibody
atctcaagagatgattcaaaaaatacgctgtatctgcaaatgaacagcctgaaaaccgaggacacagccgtgtattactgtactccctcgaatcggggagttattatttttgcctactggggccaggga

SEQ ID NO: 8589 - protein, 43 aa, Artificial Sequence
  Description of Artificial Sequence: Synthetic antibody
ISRDDSKNTLYLQMNSLKTEDTAVYYCTPSNRGVIIFAYWGQG

SEQ ID NO: 8590 - DNA, 129 bp, Artificial Sequence
  Description of Artificial Sequence: Synthetic antibody
atctcaagagatgattcaaaaaacacgctgtatctgcaaatgaacagcctgaaaaccgaggacacagccgtgtattactgtactccctcgaatcggggagttattatttttgcctactggggccaggga

SEQ ID NO: 8591 - protein, 22 aa, Artificial Sequence
  Description of Artificial Sequence: Synthetic antibody
CARDKYYDILTGSAENYYFDYW

SEQ ID NO: 8592 - DNA, 129 bp, Artificial Sequence
  Description of Artificial Sequence: Synthetic antibody
acagtctacttggagctgagcagtctgagatctgaggacacggccgtgtattactgtgcgagagataagtattacgatattttgactggttctgccgaaaattactactttgactactggggccaggga

SEQ ID NO: 8593 - protein, 43 aa, Artificial Sequence
  Description of Artificial Sequence: Synthetic antibody
TVYLELSSLRSEDTAVYYCARDKYYDILTGSAENYYFDYWGQG

SEQ ID NO: 8594 - DNA, 129 bp, Artificial Sequence
  Description of Artificial Sequence: Synthetic antibody
acagtctacatggagctgagcagcctgagatctgaggacacggccgtgtattactgtgcgagagataagtattacgatattttgactggttctgccgaaaattactactttgactactggggccaggga

SEQ ID NO: 8595 - protein, 43 aa, Artificial Sequence
  Description of Artificial Sequence: Synthetic antibody
TVYMELSSLRSEDTAVYYCARDKYYDILTGSAENYYFDYWGQG

SEQ ID NO: 8596 - protein, 22 aa, Artificial Sequence
  Description of Artificial Sequence: Synthetic antibody
CAKGPNTYYYDSSGYYNRLDYW

SEQ ID NO: 8597 - DNA, 129 bp, Artificial Sequence
  Description of Artificial Sequence: Synthetic antibody
acgctgtatctgcaaatgaacagcctgagagccgaggacacggccgtatattactgtgcgaaagggccaaatacgtattactatgatagtagtggttattacaatagacttgactactggggccaggga

SEQ ID NO: 8598 - protein, 43 aa, Artificial Sequence
  Description of Artificial Sequence: Synthetic antibody
TLYLQMNSLRAEDTAVYYCAKGPNTYYYDSSGYYNRLDYWGQG

SEQ ID NO: 8599 - DNA, 129 bp, Artificial Sequence
  Description of Artificial Sequence: Synthetic antibody
aagatgtatctgcaaatgaacagcctgagagccgaggacacggccgtatattactgtgcgaaagggccaaatacgtattactatgatagtagtggttattacaatagacttgactactggggccaggga

SEQ ID NO: 8600 - protein, 43 aa, Artificial Sequence
  Description of Artificial Sequence: Synthetic antibody
KMYLQMNSLRAEDTAVYYCAKGPNTYYYDSSGYYNRLDYWGQG

SEQ ID NO: 8601 - protein, 16 aa, Artificial Sequence
  Description of Artificial Sequence: Synthetic antibody
CAKPAPGYTWNYADYW

SEQ ID NO: 8602 - DNA, 129 bp, Artificial Sequence
  Description of Artificial Sequence: Synthetic antibody
agagataattccaagaacacgctgtatctgcaaatgaacagcctgagagccgaggacacggccgtatattactgtgcgaaacccgctcctgggtatacctggaattacgctgactactggggccaggga

SEQ ID NO: 8603 - protein, 43 aa, Artificial Sequence
  Description of Artificial Sequence: Synthetic antibody
RDNSKNTLYLQMNSLRAEDTAVYYCAKPAPGYTWNYADYWGQG

SEQ ID NO: 8604 - DNA, 129 bp, Artificial Sequence
  Description of Artificial Sequence: Synthetic antibody
agagacaattccaggaacacgctgtctctccaaatgaacagcctgagagccgaggacacggccgtatattactgtgcgaaacccgctcctgggtatacctggaattacgctgactactggggccaggga

SEQ ID NO: 8605 - protein, 43 aa, Artificial Sequence
  Description of Artificial Sequence: Synthetic antibody
RDNSRNTLSLQMNSLRAEDTAVYYCAKPAPGYTWNYADYWGQG

SEQ ID NO: 8606 - protein, 18 aa, Artificial Sequence
  Description of Artificial Sequence: Synthetic antibody
CAHEKGFNYYDSSGYGYW

SEQ ID NO: 8607 - DNA, 129 bp, Artificial Sequence
  Description of Artificial Sequence: Synthetic antibody
acctccaaaaaccaggtggtccttacaatgaccaacatggaccctgtggacacagccacatattactgtgcacacgaaaaaggttttaattactatgatagtagtggttatggctactggggccaggga

SEQ ID NO: 8608 - protein, 43 aa, Artificial Sequence
  Description of Artificial Sequence: Synthetic antibody
TSKNQVVLTMTNMDPVDTATYYCAHEKGFNYYDSSGYGYWGQG

SEQ ID NO: 8609 - DNA, 129 bp, Artificial Sequence
  Description of Artificial Sequence: Synthetic antibody
cacctccaaaaccaggtggtccttacaatgaccaacatggaccctgtggacacagccacatattactgtgcacacgaaaaaggttttaattactatgatagtagtggttatggctactggggccaggga

SEQ ID NO: 8610 - protein, 43 aa, Artificial Sequence
  Description of Artificial Sequence: Synthetic antibody
HLQNQVVLTMTNMDPVDTATYYCAHEKGFNYYDSSGYGYWGQG

SEQ ID NO: 8611 - protein, 25 aa, Artificial Sequence
  Description of Artificial Sequence: Synthetic antibody
CTTDFFLYRHQYCSGGSCYSPFDYW

SEQ ID NO: 8612 - DNA, 129 bp, Artificial Sequence
  Description of Artificial Sequence: Synthetic antibody
ctgcaaatgaacagcttgaaaaccgaggacacagccgtgtattactgtaccacagatttttttttgtatcgtcatcaatattgtagtggtggtagctgctactccccgtttgactactggggccaggga

SEQ ID NO: 8613 - protein, 43 aa, Artificial Sequence
  Description of Artificial Sequence: Synthetic antibody
LQMNSLKTEDTAVYYCTTDFFLYRHQYCSGGSCYSPFDYWGQG

SEQ ID NO: 8614 - DNA, 129 bp, Artificial Sequence
  Description of Artificial Sequence: Synthetic antibody
ctgcaaatgaacagcctgaaaaccgaggacacagccgtgtattactgtaccacagatttttttttgtatcgtcatcaatattgtagtggtggtagctgctactccccgtttgactactggggccaggga

SEQ ID NO: 8615 - protein, 11 aa, Artificial Sequence
  Description of Artificial Sequence: Synthetic antibody
CAKGSSGWSDW

SEQ ID NO: 8616 - DNA, 129 bp, Artificial Sequence
  Description of Artificial Sequence: Synthetic antibody
cgattcaccatctccagagacaattccaagaacacgctgtatcttcaaatgaacagcctgagagccgaggacacggccgtgtattactgtgcgaagggtagcagtggctggtccgactggggccaggga

SEQ ID NO: 8617 - protein, 43 aa, Artificial Sequence
  Description of Artificial Sequence: Synthetic antibody
RFTISRDNSKNTLYLQMNSLRAEDTAVYYCAKGSSGWSDWGQG

SEQ ID NO: 8618 - DNA, 129 bp, Artificial Sequence
  Description of Artificial Sequence: Synthetic antibody
cgattcaccatctccagacacaataccaagaacacgctgtatcttcaaatgaacagcctgagagccgaggacacggccgtgtattactgtgcgaagggtagcagtggctggtccgactggggccaggga

SEQ ID NO: 8619 - protein, 43 aa, Artificial Sequence
  Description of Artificial Sequence: Synthetic antibody
RFTISRHNTKNTLYLQMNSLRAEDTAVYYCAKGSSGWSDWGQG

SEQ ID NO: 8620 - protein, 20 aa, Artificial Sequence
  Description of Artificial Sequence: Synthetic antibody
CAKDLGGTHYYYYYYGMDVW

SEQ ID NO: 8621 - DNA, 129 bp, Artificial Sequence
  Description of Artificial Sequence: Synthetic antibody
aagaacacgctgtatctgcaaatgaacagcctgagagccgaggacacggccgtatattactgtgcgaaagatctcggggggacccactattactactactactacggtatggacgtctggggccaaggg

SEQ ID NO: 8622 - protein, 43 aa, Artificial Sequence
  Description of Artificial Sequence: Synthetic antibody
KNTLYLQMNSLRAEDTAVYYCAKDLGGTHYYYYYYGMDVWGQG

SEQ ID NO: 8623 - DNA, 129 bp, Artificial Sequence
  Description of Artificial Sequence: Synthetic antibody
aacaacacgctgtatctgcaaatcaacagcctgagagccgaggacacggccgtatattactgtgcgaaagatctcggggggacccactattactactactactacggtatggacgtctggggccaaggg

SEQ ID NO: 8624 - protein, 43 aa, Artificial Sequence
  Description of Artificial Sequence: Synthetic antibody
NNTLYLQINSLRAEDTAVYYCAKDLGGTHYYYYYYGMDVWGQG

SEQ ID NO: 8625 - protein, 12 aa, Artificial Sequence
  Description of Artificial Sequence: Synthetic antibody
CARHSGSGVDYW

SEQ ID NO: 8626 - DNA, 129 bp, Artificial Sequence
  Description of Artificial Sequence: Synthetic antibody
gtcaccatatccgtagacacgtccaagaaccagttctccctgaagctgagctctgtgaccgccgcagacacggctgtgtattactgtgcgagacatagtggtagcggggttgactactggggccaggga

SEQ ID NO: 8627 - protein, 43 aa, Artificial Sequence
  Description of Artificial Sequence: Synthetic antibody
VTISVDTSKNQFSLKLSSVTAADTAVYYCARHSGSGVDYWGQG

SEQ ID NO: 8628 - DNA, 129 bp, Artificial Sequence
  Description of Artificial Sequence: Synthetic antibody
gtcaccatatccgtagacacgtccaagaaccagttctccctgaagctgagctccgtgaccgccgcagacacggctgtgtattactgtgcgagacatagtggtagcggggttgactactggggccaggga

SEQ ID NO: 8629 - protein, 13 aa, Artificial Sequence
  Description of Artificial Sequence: Synthetic antibody
CAKVGHSYYFDYW

SEQ ID NO: 8630 - DNA, 129 bp, Artificial Sequence
  Description of Artificial Sequence: Synthetic antibody
accatctccatatataattccaagaacacgctgtatctgcaaatgaacagcctgagagccgaggacacggccgtatattactgtgcgaaagttgggcattcctactactttgactactggggccaggga

SEQ ID NO: 8631 - protein, 43 aa, Artificial Sequence
  Description of Artificial Sequence: Synthetic antibody
TISIYNSKNTLYLQMNSLRAEDTAVYYCAKVGHSYYFDYWGQG

SEQ ID NO: 8632 - DNA, 129 bp, Artificial Sequence
  Description of Artificial Sequence: Synthetic antibody
accatctccagagataattccaagaacacgctgtatctgcaaatgaacagcctgagagccgaggacacggccgtatattactgtgcgaaagttgggcattcctactactttgactactggggccaggga

SEQ ID NO: 8633 - protein, 43 aa, Artificial Sequence
  Description of Artificial Sequence: Synthetic antibody
TISRDNSKNTLYLQMNSLRAEDTAVYYCAKVGHSYYFDYWGQG

SEQ ID NO: 8634 - protein, 16 aa, Artificial Sequence
  Description of Artificial Sequence: Synthetic antibody
CSKGVGITIFGVPYYW

SEQ ID NO: 8635 - DNA, 129 bp, Artificial Sequence
  Description of Artificial Sequence: Synthetic antibody
cagagacaacagcaaaactccctgtatctgcaaatgaacagtctgacaactgaggactccgccttgtattactgttcaaaaggagtaggtataacgatttttggagtgccttactactggggccaggga

SEQ ID NO: 8636 - protein, 43 aa, Artificial Sequence
  Description of Artificial Sequence: Synthetic antibody
QRQQQNSLYLQMNSLTTEDSALYYCSKGVGITIFGVPYYWGQG

SEQ ID NO: 8637 - DNA, 129 bp, Artificial Sequence
  Description of Artificial Sequence: Synthetic antibody
agagacaacagcaaaaactccctgtatctgcaaatgaacagtctgacaactgaggactccgccttgtattactgttcaaaaggagtaggtataacgatttttggagtgccttactactggggccaggga

SEQ ID NO: 8638 - protein, 43 aa, Artificial Sequence
  Description of Artificial Sequence: Synthetic antibody
RDNSKNSLYLQMNSLTTEDSALYYCSKGVGITIFGVPYYWGQG

SEQ ID NO: 8639 - protein, 14 aa, Artificial Sequence
  Description of Artificial Sequence: Synthetic antibody
CARDGPPDSYFDYW

SEQ ID NO: 8640 - DNA, 129 bp, Artificial Sequence
  Description of Artificial Sequence: Synthetic antibody
attaccgcggacaaatccacgagcacagcctacatggagctgagcagcctgagatctgaggacacggccgtgtattactgtgcgagagatggccccccggactcatactttgactactggggccaggga

SEQ ID NO: 8641 - protein, 43 aa, Artificial Sequence
  Description of Artificial Sequence: Synthetic antibody
ITADKSTSTAYMELSSLRSEDTAVYYCARDGPPDSYFDYWGQG

SEQ ID NO: 8642 - DNA, 129 bp, Artificial Sequence
  Description of Artificial Sequence: Synthetic antibody
attaccgcgcacaaatccacgagcacagcctacatggagctgagcagcctgagatctgaggacacggccgtgtattactgtgcgagagatggccccccggactcatactttgactactggggccaggga

SEQ ID NO: 8643 - protein, 43 aa, Artificial Sequence
  Description of Artificial Sequence: Synthetic antibody
ITAHKSTSTAYMELSSLRSEDTAVYYCARDGPPDSYFDYWGQG

SEQ ID NO: 8644 - protein, 13 aa, Artificial Sequence
  Description of Artificial Sequence: Synthetic antibody
CAKIYNYGYFDYW

SEQ ID NO: 8645 - DNA, 129 bp, Artificial Sequence
  Description of Artificial Sequence: Synthetic antibody
accatctccatatataattccaagaacacgctgtatctgcaaatgaacagcctgagagccgaggacacggccgtatattactgtgcgaaaatctacaactatggttactttgactactggggccaggga

SEQ ID NO: 8646 - protein, 43 aa, Artificial Sequence
  Description of Artificial Sequence: Synthetic antibody
TISIYNSKNTLYLQMNSLRAEDTAVYYCAKIYNYGYFDYWGQG

SEQ ID NO: 8647 - DNA, 129 bp, Artificial Sequence
  Description of Artificial Sequence: Synthetic antibody
accatctccagagataattccaagaacacgctgtatctgcaaatgaacagcctgagagccgaggacacggccgtatattactgtgcgaaaatctacaactatggttactttgactactggggccaggga

SEQ ID NO: 8648 - protein, 43 aa, Artificial Sequence
  Description of Artificial Sequence: Synthetic antibody
TISRDNSKNTLYLQMNSLRAEDTAVYYCAKIYNYGYFDYWGQG

SEQ ID NO: 8649 - protein, 16 aa, Artificial Sequence
  Description of Artificial Sequence: Synthetic antibody
CARDRGSSWIYYFDYW

SEQ ID NO: 8650 - DNA, 129 bp, Artificial Sequence
  Description of Artificial Sequence: Synthetic antibody
tgggacacgtccacgagcacagtctacatggagctgagcagcctgagatctgaggacacggccgtgtattactgtgcgagagatcgaggcagcagctggatatactactttgactactggggccaggga

SEQ ID NO: 8651 - protein, 43 aa, Artificial Sequence
  Description of Artificial Sequence: Synthetic antibody
WDTSTSTVYMELSSLRSEDTAVYYCARDRGSSWIYYFDYWGQG

SEQ ID NO: 8652 - DNA, 129 bp, Artificial Sequence
  Description of Artificial Sequence: Synthetic antibody
agggacacgtccacgagcacagtctacatggagctgagcagcctgagatctgaggacacggccgtgtattactgtgcgagagatcgaggcagcagctggatatactactttgactactggggccaggga

SEQ ID NO: 8653 - protein, 43 aa, Artificial Sequence
  Description of Artificial Sequence: Synthetic antibody
RDTSTSTVYMELSSLRSEDTAVYYCARDRGSSWIYYFDYWGQG

SEQ ID NO: 8654 - protein, 25 aa, Artificial Sequence
  Description of Artificial Sequence: Synthetic antibody
CARYYYDSSGYYGDLLETPYYFDYW

SEQ ID NO: 8655 - DNA, 129 bp, Artificial Sequence
  Description of Artificial Sequence: Synthetic antibody
ttggagctgaggagcctgagatctgacgacacggccgtgtattactgtgcgagatattactatgatagtagtggttattacggggacctgttggagaccccttactactttgactactggggccaggga

SEQ ID NO: 8656 - protein, 43 aa, Artificial Sequence
  Description of Artificial Sequence: Synthetic antibody
LELRSLRSDDTAVYYCARYYYDSSGYYGDLLETPYYFDYWGQG

SEQ ID NO: 8657 - DNA, 129 bp, Artificial Sequence
  Description of Artificial Sequence: Synthetic antibody
atggagctgaggagcctgagatctgacgacacggccgtgtattactgtgcgagatattactatgatagtagtggttattacggggacctgttggagaccccttactactttgactactggggccaggga

SEQ ID NO: 8658 - protein, 43 aa, Artificial Sequence
  Description of Artificial Sequence: Synthetic antibody
MELRSLRSDDTAVYYCARYYYDSSGYYGDLLETPYYFDYWGQG

SEQ ID NO: 8659 - protein, 23 aa, Artificial Sequence
  Description of Artificial Sequence: Synthetic antibody
CARDWFYGDSRPDYYYYYGMDVW

SEQ ID NO: 8660 - DNA, 129 bp, Artificial Sequence
  Description of Artificial Sequence: Synthetic antibody
gcctacatggagctgagcagcctgagatctggggacacggccgtgtattactgtgcgagagattggttctacggtgactcacgtcctgattactactactactacggtatggacgtctggggccaaggg

SEQ ID NO: 8661 - protein, 43 aa, Artificial Sequence
  Description of Artificial Sequence: Synthetic antibody
AYMELSSLRSGDTAVYYCARDWFYGDSRPDYYYYYGMDVWGQG

SEQ ID NO: 8662 - DNA, 129 bp, Artificial Sequence
  Description of Artificial Sequence: Synthetic antibody
gcctacatggagctgagcagcctgagatctgaggacacggccgtgtattactgtgcgagagattggttctacggtgactcacgtcctgattactactactactacggtatggacgtctggggccaaggg

SEQ ID NO: 8663 - protein, 43 aa, Artificial Sequence
  Description of Artificial Sequence: Synthetic antibody
AYMELSSLRSEDTAVYYCARDWFYGDSRPDYYYYYGMDVWGQG

SEQ ID NO: 8664 - protein, 16 aa, Artificial Sequence
  Description of Artificial Sequence: Synthetic antibody
CARVRFHWNYALFDSW

SEQ ID NO: 8665 - DNA, 129 bp, Artificial Sequence
  Description of Artificial Sequence: Synthetic antibody
ttagacacgtccaacaaccaggtctccctgaacttgaggtctgtgaccgccgcggacacggccgtatatttctgtgcgagagtaaggtttcactggaactacgccctttttgactcctggggccaggga

SEQ ID NO: 8666 - protein, 43 aa, Artificial Sequence
  Description of Artificial Sequence: Synthetic antibody
LDTSNNQVSLNLRSVTAADTAVYFCARVRFHWNYALFDSWGQG

SEQ ID NO: 8667 - DNA, 129 bp, Artificial Sequence
  Description of Artificial Sequence: Synthetic antibody
atagacacgtccaagaaccaggtctccctgaacttgaggtctgtgaccgccgcggacacggccgtatatttctgtgcgagagtaaggtttcactggaactacgccctttttgactcctggggccaggga

SEQ ID NO: 8668 - protein, 43 aa, Artificial Sequence
  Description of Artificial Sequence: Synthetic antibody
IDTSKNQVSLNLRSVTAADTAVYFCARVRFHWNYALFDSWGQG

SEQ ID NO: 8669 - protein, 15 aa, Artificial Sequence
  Description of Artificial Sequence: Synthetic antibody
CAKSGQLRSRDFDLW

SEQ ID NO: 8670 - DNA, 129 bp, Artificial Sequence
  Description of Artificial Sequence: Synthetic antibody
tccagagataattccaagaacacgctgtatctgcaaatgaacagcctgagagccgaggacacggccgtatattactgtgcgaaatcaggccagctgcgatcgagggacttcgatctctggggtcgtggc

SEQ ID NO: 8671 - protein, 43 aa, Artificial Sequence
  Description of Artificial Sequence: Synthetic antibody
SRDNSKNTLYLQMNSLRAEDTAVYYCAKSGQLRSRDFDLWGRG

SEQ ID NO: 8672 - DNA, 129 bp, Artificial Sequence
  Description of Artificial Sequence: Synthetic antibody
tccagagataattccaagaacacgctgtatctgcaaatgaacagcctgagagccgaggacacggccgtatattactgtgcgaaatcaggccagctgcgatcgagggacttcgatctctggggccgtggc

SEQ ID NO: 8673 - protein, 15 aa, Artificial Sequence
  Description of Artificial Sequence: Synthetic antibody
CAKASDYGDYLFDYW

SEQ ID NO: 8674 - DNA, 129 bp, Artificial Sequence
  Description of Artificial Sequence: Synthetic antibody
tccagagataattccaagaacacgctgtatctgcaaatgaacagcctgagagccgaggacacggccgtatattactgtgcgaaagcctccgactacggtgactacctctttgactactggggccaggga

SEQ ID NO: 8675 - protein, 43 aa, Artificial Sequence
  Description of Artificial Sequence: Synthetic antibody
SRDNSKNTLYLQMNSLRAEDTAVYYCAKASDYGDYLFDYWGQG

SEQ ID NO: 8676 - DNA, 129 bp, Artificial Sequence
  Description of Artificial Sequence: Synthetic antibody
tccagagataattccaagaacacgctgtatctgcaaatgaacagcctgagagccgaggacacggccgtatattactgtgcgaaagcctccgactacggtgactacctctttgactactgggaccaggga

SEQ ID NO: 8677 - protein, 43 aa, Artificial Sequence
  Description of Artificial Sequence: Synthetic antibody
SRDNSKNTLYLQMNSLRAEDTAVYYCAKASDYGDYLFDYWDQG

SEQ ID NO: 8678 - protein, 16 aa, Artificial Sequence
  Description of Artificial Sequence: Synthetic antibody
CAKGRSGSYQTLFEYW

SEQ ID NO: 8679 - DNA, 129 bp, Artificial Sequence
  Description of Artificial Sequence: Synthetic antibody
agagacaattccaagaataggctgtatcttcaaatggacagcctgagagtcgaggacacggccatgtattactgtgcgaaaggaagaagcgggagctaccaaaccctctttgaatactggggccaggga

SEQ ID NO: 8680 - protein, 43 aa, Artificial Sequence
  Description of Artificial Sequence: Synthetic antibody
RDNSKNRLYLQMDSLRVEDTAMYYCAKGRSGSYQTLFEYWGQG

SEQ ID NO: 8681 - DNA, 129 bp, Artificial Sequence
  Description of Artificial Sequence: Synthetic antibody
agagacaattccaagaataggctgtatcttcaaatggacagcctgagagtcgaggacacggccatgcattactgtgcgaaaggaagaagcgggagctaccaaaccctctttgaatactggggccaggga

SEQ ID NO: 8682 - protein, 43 aa, Artificial Sequence
  Description of Artificial Sequence: Synthetic antibody
RDNSKNRLYLQMDSLRVEDTAMHYCAKGRSGSYQTLFEYWGQG

SEQ ID NO: 8683 - protein, 19 aa, Artificial Sequence
  Description of Artificial Sequence: Synthetic antibody
CAKGQRFLEWLPIPPFADW

SEQ ID NO: 8684 - DNA, 129 bp, Artificial Sequence
  Description of Artificial Sequence: Synthetic antibody
tccaagaacatggtttatctgcacatgaacagcctgagagccgacgacacggccgtatattattgtgcgaaagggcaacgatttttggagtggttgcccatacccccgtttgcagactggggccaggga

SEQ ID NO: 8685 - protein, 43 aa, Artificial Sequence
  Description of Artificial Sequence: Synthetic antibody
SKNMVYLHMNSLRADDTAVYYCAKGQRFLEWLPIPPFADWGQG

SEQ ID NO: 8686 - DNA, 129 bp, Artificial Sequence
  Description of Artificial Sequence: Synthetic antibody
tccaagaacacgctgtatctgcaaatgaacagcctgagagccgacgacacggccgtatattattgtgcgaaagggcaacgatttttggagtggttgcccatacccccgtttgcagactggggccaggga

SEQ ID NO: 8687 - protein, 43 aa, Artificial Sequence
  Description of Artificial Sequence: Synthetic antibody
SKNTLYLQMNSLRADDTAVYYCAKGQRFLEWLPIPPFADWGQG

SEQ ID NO: 8688 - protein, 19 aa, Artificial Sequence
  Description of Artificial Sequence: Synthetic antibody
CASGHGIAVAGTMDAFDIW

SEQ ID NO: 8689 - DNA, 129 bp, Artificial Sequence
  Description of Artificial Sequence: Synthetic antibody
tccaagaacacgctgtatcttcaaatgaacagcctgagagccgaggacacggccgtgtattactgtgcgagcggccatggtatagcagtggctggtaccatggatgcttttgatatctggggccaaggg

SEQ ID NO: 8690 - protein, 43 aa, Artificial Sequence
  Description of Artificial Sequence: Synthetic antibody
SKNTLYLQMNSLRAEDTAVYYCASGHGIAVAGTMDAFDIWGQG

SEQ ID NO: 8691 - DNA, 129 bp, Artificial Sequence
  Description of Artificial Sequence: Synthetic antibody
tccaagaacaagatgtatcttcaaatgaacagcctgagagccgaggacacggccgtgtattactgtgcgagcggccatggtatagcagtggctggtaccatggatgcttttgatatctggggccaaggg

SEQ ID NO: 8692 - protein, 43 aa, Artificial Sequence
  Description of Artificial Sequence: Synthetic antibody
SKNKMYLQMNSLRAEDTAVYYCASGHGIAVAGTMDAFDIWGQG

SEQ ID NO: 8693 - protein, 22 aa, Artificial Sequence
  Description of Artificial Sequence: Synthetic antibody
CARHIDALAAYLSYYYYGMDVW

SEQ ID NO: 8694 - DNA, 129 bp, Artificial Sequence
  Description of Artificial Sequence: Synthetic antibody
acggcatatttgcagatcagcagcctaaaggctgaggacactgccgtgtattactgtgcgagacacatcgacgctttagcagcttatctttcttactactactacggtatggacgtctggggccaaggg

SEQ ID NO: 8695 - protein, 43 aa, Artificial Sequence
  Description of Artificial Sequence: Synthetic antibody
TAYLQISSLKAEDTAVYYCARHIDALAAYLSYYYYGMDVWGQG

SEQ ID NO: 8696 - DNA, 129 bp, Artificial Sequence
  Description of Artificial Sequence: Synthetic antibody
acggcatatctgcagatcagcagcctaaaggctgaggacactgccgtgtattactgtgcgagacacatcgacgctttagcagcttatctttcttactactactacggtatggacgtctggggccaaggg

SEQ ID NO: 8697 - protein, 19 aa, Artificial Sequence
  Description of Artificial Sequence: Synthetic antibody
CTTLDIAHYYYYYYGMDVW

SEQ ID NO: 8698 - DNA, 129 bp, Artificial Sequence
  Description of Artificial Sequence: Synthetic antibody
tcaaaaaacacgctgtatctgcaaatgaacagcctgaaaaccgaggacacagccgtgtattactgtaccacacttgacatagctcattattactactactactacggtatggacgtctggggccaaggg

SEQ ID NO: 8699 - protein, 43 aa, Artificial Sequence
  Description of Artificial Sequence: Synthetic antibody
SKNTLYLQMNSLKTEDTAVYYCTTLDIAHYYYYYYGMDVWGQG

SEQ ID NO: 8700 - DNA, 129 bp, Artificial Sequence
  Description of Artificial Sequence: Synthetic antibody
ttcaaaaacacgctgtatctgcaaatgaacagcctgaaaaccgaggacacagccgtgtattactgtaccacacttgacatagctcattattactactactactacggtatggacgtctggggccaaggg

SEQ ID NO: 8701 - protein, 43 aa, Artificial Sequence
  Description of Artificial Sequence: Synthetic antibody
FKNTLYLQMNSLKTEDTAVYYCTTLDIAHYYYYYYGMDVWGQG

SEQ ID NO: 8702 - protein, 17 aa, Artificial Sequence
  Description of Artificial Sequence: Synthetic antibody
CAKDPRQNYGPTYFDLW

SEQ ID NO: 8703 - DNA, 129 bp, Artificial Sequence
  Description of Artificial Sequence: Synthetic antibody
gatgattccaagaacacggtgtatttgcaaatgaacagcctgagagccgaggacacggccgtctattactgtgcgaaagatccccgccaaaactacggacctacgtacttcgatctctggggccgtggc

SEQ ID NO: 8704 - protein, 43 aa, Artificial Sequence
  Description of Artificial Sequence: Synthetic antibody
DDSKNTVYLQMNSLRAEDTAVYYCAKDPRQNYGPTYFDLWGRG

SEQ ID NO: 8705 - DNA, 129 bp, Artificial Sequence
  Description of Artificial Sequence: Synthetic antibody
gacaattccaagaacacgctgtatctgcaaatgaacagcctgagagccgaggacacggccgtctattactgtgcgaaagatccccgccaaaactacggacctacgtacttcgatctctggggccgtggc

SEQ ID NO: 8706 - protein, 43 aa, Artificial Sequence
  Description of Artificial Sequence: Synthetic antibody
DNSKNTLYLQMNSLRAEDTAVYYCAKDPRQNYGPTYFDLWGRG

SEQ ID NO: 8707 - protein, 22 aa, Artificial Sequence
  Description of Artificial Sequence: Synthetic antibody
CAHAYCSTTSCDPYYYYDMDVW

SEQ ID NO: 8708 - DNA, 129 bp, Artificial Sequence
  Description of Artificial Sequence: Synthetic antibody
caggtggtccttacagtgaccaacatggaccctgtggacacagccacatattactgtgcacacgcgtattgtagtaccaccagctgcgacccctactactactacgatatggacgtctggggccaaggg

SEQ ID NO: 8709 - protein, 43 aa, Artificial Sequence
  Description of Artificial Sequence: Synthetic antibody
QVVLTVTNMDPVDTATYYCAHAYCSTTSCDPYYYYDMDVWGQG

SEQ ID NO: 8710 - DNA, 129 bp, Artificial Sequence
  Description of Artificial Sequence: Synthetic antibody
caggtggtccctacagtgaccaacatggaccctgtggacacagccgcatattactgtgcacacgcgtattgtagtaccaccagctgcgacccctactactactacgatatggacgtctggggccaaggg

SEQ ID NO: 8711 - protein, 43 aa, Artificial Sequence
  Description of Artificial Sequence: Synthetic antibody
QVVPTVTNMDPVDTAAYYCAHAYCSTTSCDPYYYYDMDVWGQG

SEQ ID NO: 8712 - protein, 17 aa, Artificial Sequence
  Description of Artificial Sequence: Synthetic antibody
CAHRPSLQWLDWWFDPW

SEQ ID NO: 8713 - DNA, 129 bp, Artificial Sequence
  Description of Artificial Sequence: Synthetic antibody
gacacctccaaaaaccaggtggtccttacaatgaccaacatggaccctgtggacacagccacatattactgtgcacacagacccagccttcagtggctggactggtggttcgacccctggggccaggga

SEQ ID NO: 8714 - protein, 43 aa, Artificial Sequence
  Description of Artificial Sequence: Synthetic antibody
DTSKNQVVLTMTNMDPVDTATYYCAHRPSLQWLDWWFDPWGQG

SEQ ID NO: 8715 - DNA, 129 bp, Artificial Sequence
  Description of Artificial Sequence: Synthetic antibody
ggacacctccaaaaccaggtggtccttacaatgaccaacatggaccctgtggacacagccacatattactgtgcacacagacccagccttcagtggctggactggtggttcgacccctggggccaggga

SEQ ID NO: 8716 - protein, 43 aa, Artificial Sequence
  Description of Artificial Sequence: Synthetic antibody
GHLQNQVVLTMTNMDPVDTATYYCAHRPSLQWLDWWFDPWGQG

SEQ ID NO: 8717 - protein, 16 aa, Artificial Sequence
  Description of Artificial Sequence: Synthetic antibody
CARTWRRDGYRYFDYW

SEQ ID NO: 8718 - DNA, 129 bp, Artificial Sequence
  Description of Artificial Sequence: Synthetic antibody
tgggacacgtccattagcacagcctacatggagttgagcaggctgagatcagacgacacggccgtgtattattgtgcgaggacatggcgtagagatggctacagatactttgactactggggccaggga

SEQ ID NO: 8719 - protein, 43 aa, Artificial Sequence
  Description of Artificial Sequence: Synthetic antibody
WDTSISTAYMELSRLRSDDTAVYYCARTWRRDGYRYFDYWGQG

SEQ ID NO: 8720 - DNA, 129 bp, Artificial Sequence
  Description of Artificial Sequence: Synthetic antibody
agggacacgtccattagcacagcctacatggagttgagcaggctgagatcagacgacacggccgtgtattattgtgcgaggacatggcgtagagatggctacagatactttgactactggggccaggga

SEQ ID NO: 8721 - protein, 43 aa, Artificial Sequence
  Description of Artificial Sequence: Synthetic antibody
RDTSISTAYMELSRLRSDDTAVYYCARTWRRDGYRYFDYWGQG

SEQ ID NO: 8722 - protein, 20 aa, Artificial Sequence
  Description of Artificial Sequence: Synthetic antibody
CTRDMLTSVIRTYYYGMDVW

SEQ ID NO: 8723 - DNA, 129 bp, Artificial Sequence
  Description of Artificial Sequence: Synthetic antibody
aagaacacggtgtatctgcaaatgaacagtctgggagccgaggacacggctacttattactgtacaagagatatgctgacttcggtgattaggacatactactacggtatggacgtctggggccaaggg

SEQ ID NO: 8724 - protein, 43 aa, Artificial Sequence
  Description of Artificial Sequence: Synthetic antibody
KNTVYLQMNSLGAEDTATYYCTRDMLTSVIRTYYYGMDVWGQG

SEQ ID NO: 8725 - DNA, 129 bp, Artificial Sequence
  Description of Artificial Sequence: Synthetic antibody
aagaacacggtgtatctgcaaatgaacagtctgagagccgaggacacggctacttattactgtacaagagatatgctgacttcggtgattaggacatactactacggtatggacgtctggggccaaggg

SEQ ID NO: 8726 - protein, 43 aa, Artificial Sequence
  Description of Artificial Sequence: Synthetic antibody
KNTVYLQMNSLRAEDTATYYCTRDMLTSVIRTYYYGMDVWGQG

SEQ ID NO: 8727 - protein, 25 aa, Artificial Sequence
  Description of Artificial Sequence: Synthetic antibody
CARDYYYGSGSYYNGDNYYYGMDVW

SEQ ID NO: 8728 - DNA, 129 bp, Artificial Sequence
  Description of Artificial Sequence: Synthetic antibody
atggagctgaggagcctgagatctgacgacacggccgtgtattactgtgcgagagattattactatggttcggggagttattataacggagataactactactacggtatggacgtctggggccaaggg

SEQ ID NO: 8729 - protein, 43 aa, Artificial Sequence
  Description of Artificial Sequence: Synthetic antibody
MELRSLRSDDTAVYYCARDYYYGSGSYYNGDNYYYGMDVWGQG

SEQ ID NO: 8730 - DNA, 129 bp, Artificial Sequence
  Description of Artificial Sequence: Synthetic antibody
atggagctgaggagcctgagatctgacgacacggccgtgtattactgtgcgagagattattactatggttcggggagctattataacggagataactactactacggtatggacgtctggggccaaggg

SEQ ID NO: 8731 - protein, 14 aa, Artificial Sequence
  Description of Artificial Sequence: Synthetic antibody
CARVIGKDATGDYW

SEQ ID NO: 8732 - DNA, 129 bp, Artificial Sequence
  Description of Artificial Sequence: Synthetic antibody
atctccagagacaatgccaagaactcactgtatctgcaaatgaacagcctgagagacgaggacacggctgtgtattactgtgcgagagtgatagggaaggatgctacgggagactactggggccaggga

SEQ ID NO: 8733 - protein, 43 aa, Artificial Sequence
  Description of Artificial Sequence: Synthetic antibody
ISRDNAKNSLYLQMNSLRDEDTAVYYCARVIGKDATGDYWGQG

SEQ ID NO: 8734 - DNA, 129 bp, Artificial Sequence
  Description of Artificial Sequence: Synthetic antibody
atctccagacacaatcccaagaactcactgtatctgcaaatgaacagcctgagagacgaggacacggctgtgtattactgtgcgagagtgatagggaaggatgctacgggagactactggggccaggga

SEQ ID NO: 8735 - protein, 43 aa, Artificial Sequence
  Description of Artificial Sequence: Synthetic antibody
ISRHNPKNSLYLQMNSLRDEDTAVYYCARVIGKDATGDYWGQG

SEQ ID NO: 8736 - protein, 21 aa, Artificial Sequence
  Description of Artificial Sequence: Synthetic antibody
CARGPEDYGDSYYYYYGMDVW

SEQ ID NO: 8737 - DNA, 129 bp, Artificial Sequence
  Description of Artificial Sequence: Synthetic antibody
tgcacagcctacttggagctgagcagcctgagatctgaggacacggccgtgtattactgtgcgagaggcccggaggactacggtgactcttactactactactacggtatggacgtctggggccaaggg

SEQ ID NO: 8738 - protein, 43 aa, Artificial Sequence
  Description of Artificial Sequence: Synthetic antibody
CTAYLELSSLRSEDTAVYYCARGPEDYGDSYYYYYGMDVWGQG

SEQ ID NO: 8739 - DNA, 129 bp, Artificial Sequence
  Description of Artificial Sequence: Synthetic antibody
agcacagcctacatggagctgagcagcctgagatctgaggacacggccgtgtattactgtgcgagaggcccggaggactacggtgactcttactactactactacggtatggacgtctggggccaaggg

SEQ ID NO: 8740 - protein, 43 aa, Artificial Sequence
  Description of Artificial Sequence: Synthetic antibody
STAYMELSSLRSEDTAVYYCARGPEDYGDSYYYYYGMDVWGQG

SEQ ID NO: 8741 - protein, 18 aa, Artificial Sequence
  Description of Artificial Sequence: Synthetic antibody
CAHSRSRYSSGWYYFDYW

SEQ ID NO: 8742 - DNA, 129 bp, Artificial Sequence
  Description of Artificial Sequence: Synthetic antibody
acctccaaaaaccaggtggtccttacaatgaccaacatggaccctgtggacacagccacatattactgtgcacacagtcgtagtaggtatagcagtggctggtactactttgactactggggccaggga

SEQ ID NO: 8743 - protein, 43 aa, Artificial Sequence
  Description of Artificial Sequence: Synthetic antibody
TSKNQVVLTMTNMDPVDTATYYCAHSRSRYSSGWYYFDYWGQG

SEQ ID NO: 8744 - DNA, 129 bp, Artificial Sequence
  Description of Artificial Sequence: Synthetic antibody
cacctccaaaaccaggtggtccttacaatgaccaacatggaccctgtggacacagccacatattactgtgcacacagtcgtagtaggtatagcagtggctggtactactttgactactggggccaggga

SEQ ID NO: 8745 - protein, 43 aa, Artificial Sequence
  Description of Artificial Sequence: Synthetic antibody
HLQNQVVLTMTNMDPVDTATYYCAHSRSRYSSGWYYFDYWGQG

SEQ ID NO: 8746 - protein, 16 aa, Artificial Sequence
  Description of Artificial Sequence: Synthetic antibody
CAKGLRWQKTNYFDYW

SEQ ID NO: 8747 - DNA, 129 bp, Artificial Sequence
  Description of Artificial Sequence: Synthetic antibody
agatataattccaacaacacgctgtatctgcaaatgaacagcctgagagccgaggacacggccgtatattactgtgcgaaaggtctacggtggcaaaaaacaaactactttgactactggggccaggga

SEQ ID NO: 8748 - protein, 43 aa, Artificial Sequence
  Description of Artificial Sequence: Synthetic antibody
RYNSNNTLYLQMNSLRAEDTAVYYCAKGLRWQKTNYFDYWGQG

SEQ ID NO: 8749 - DNA, 129 bp, Artificial Sequence
  Description of Artificial Sequence: Synthetic antibody
agagataattccaagaacacgctgtatctgcaaatgaacagcctgagagccgaggacacggccgtatattactgtgcgaaaggtctacggtggcaaaaaacaaactactttgactactggggccaggga

SEQ ID NO: 8750 - protein, 43 aa, Artificial Sequence
  Description of Artificial Sequence: Synthetic antibody
RDNSKNTLYLQMNSLRAEDTAVYYCAKGLRWQKTNYFDYWGQG

SEQ ID NO: 8751 - protein, 17 aa, Artificial Sequence
  Description of Artificial Sequence: Synthetic antibody
CIRGLRGDSAYDYGAFW

SEQ ID NO: 8752 - DNA, 129 bp, Artificial Sequence
  Description of Artificial Sequence: Synthetic antibody
tatgagtcaaagaactcactgtatctccaaatgaacagcctaaaaagcgaggacacggccatatactactgtattaggggccttcgcggggatagtgcctacgattatggggccttctggggccaggga

SEQ ID NO: 8753 - protein, 43 aa, Artificial Sequence
  Description of Artificial Sequence: Synthetic antibody
YESKNSLYLQMNSLKSEDTAIYYCIRGLRGDSAYDYGAFWGQG

SEQ ID NO: 8754 - DNA, 129 bp, Artificial Sequence
  Description of Artificial Sequence: Synthetic antibody
gatgagtcaaagaactcactgtatctccaaatgaacagcctaaaaagcgaggacacggccatatactactgtattaggggccttcgcggggatagtgcctacgattatggggccttctggggccaggga

SEQ ID NO: 8755 - protein, 43 aa, Artificial Sequence
  Description of Artificial Sequence: Synthetic antibody
DESKNSLYLQMNSLKSEDTAIYYCIRGLRGDSAYDYGAFWGQG

SEQ ID NO: 8756 - protein, 21 aa, Artificial Sequence
  Description of Artificial Sequence: Synthetic antibody
CARDLVPYYGPTGGYYGMDVW

SEQ ID NO: 8757 - DNA, 129 bp, Artificial Sequence
  Description of Artificial Sequence: Synthetic antibody
tgcacagcctacatggagctgagcagcctgagatctgaggacacggccgtgtattactgtgcgagagatctagtcccttactatggtcccaccgggggctactatggtatggacgtctggggccaaggg

SEQ ID NO: 8758 - protein, 43 aa, Artificial Sequence
  Description of Artificial Sequence: Synthetic antibody
CTAYMELSSLRSEDTAVYYCARDLVPYYGPTGGYYGMDVWGQG

SEQ ID NO: 8759 - DNA, 129 bp, Artificial Sequence
  Description of Artificial Sequence: Synthetic antibody
agcacagcctacatggagctgagcagcctgagatctgaggacacggccgtgtattactgtgcgagagatctagtcccttactatggtcccaccgggggctactacggtatggacgtctggggccaaggg

SEQ ID NO: 8760 - protein, 43 aa, Artificial Sequence
  Description of Artificial Sequence: Synthetic antibody
STAYMELSSLRSEDTAVYYCARDLVPYYGPTGGYYGMDVWGQG

SEQ ID NO: 8761 - protein, 16 aa, Artificial Sequence
  Description of Artificial Sequence: Synthetic antibody
CAREGYRDYLWYFDLW

SEQ ID NO: 8762 - DNA, 129 bp, Artificial Sequence
  Description of Artificial Sequence: Synthetic antibody
tgggacaacgccaagaactctctggctctgcaaatggacagcctgagaggcgaggacgcgggtctatattactgtgcgagagagggctaccgtgactacctttggtacttcgatctctggggccgtggc

SEQ ID NO: 8763 - protein, 43 aa, Artificial Sequence
  Description of Artificial Sequence: Synthetic antibody
WDNAKNSLALQMDSLRGEDAGLYYCAREGYRDYLWYFDLWGRG

SEQ ID NO: 8764 - DNA, 129 bp, Artificial Sequence
  Description of Artificial Sequence: Synthetic antibody
agggacaacgccaagaactcactggctctgcaaatggacagcctgagaggcgaggacgcgggtctatattactgtgcgagagagggctaccgtgactacctttggtacttcgatctctggggccgtggc

SEQ ID NO: 8765 - protein, 43 aa, Artificial Sequence
  Description of Artificial Sequence: Synthetic antibody
RDNAKNSLALQMDSLRGEDAGLYYCAREGYRDYLWYFDLWGRG

SEQ ID NO: 8766 - protein, 23 aa, Artificial Sequence
  Description of Artificial Sequence: Synthetic antibody
CARGLGDIVVVPAAMRPTLFDYW

SEQ ID NO: 8767 - DNA, 129 bp, Artificial Sequence
  Description of Artificial Sequence: Synthetic antibody
ttctccctgaagctgagctctgtgactgccgcggacacggccgtgtattactgtgcgagaggtttgggggatattgtagtagtaccagctgctatgcgcccgaccctttttgactactggggccaggga

SEQ ID NO: 8768 - protein, 43 aa, Artificial Sequence
  Description of Artificial Sequence: Synthetic antibody
FSLKLSSVTAADTAVYYCARGLGDIVVVPAAMRPTLFDYWGQG

SEQ ID NO: 8769 - DNA, 129 bp, Artificial Sequence
  Description of Artificial Sequence: Synthetic antibody
ttctccctgaagctgagctctgcgactgccgcggacacggccgtgtattactgtgcgagaggtttgggggatattgtagtagtaccagctgctatgcgcccgaccctttttgactactggggccaggga

SEQ ID NO: 8770 - protein, 43 aa, Artificial Sequence
  Description of Artificial Sequence: Synthetic antibody
FSLKLSSATAADTAVYYCARGLGDIVVVPAAMRPTLFDYWGQG

SEQ ID NO: 8771 - protein, 15 aa, Artificial Sequence
  Description of Artificial Sequence: Synthetic antibody
CARHIGYGNNWFDPW

SEQ ID NO: 8772 - DNA, 129 bp, Artificial Sequence
  Description of Artificial Sequence: Synthetic antibody
tcagtagacacgtccaagaaccagttctccctgaacttgaggtctgtgaccgccgcagacacggccatatattattgtgcgagacatataggctacgggaacaactggttcgacccctggggccaggga

SEQ ID NO: 8773 - protein, 43 aa, Artificial Sequence
  Description of Artificial Sequence: Synthetic antibody
SVDTSKNQFSLNLRSVTAADTAIYYCARHIGYGNNWFDPWGQG

SEQ ID NO: 8774 - DNA, 129 bp, Artificial Sequence
  Description of Artificial Sequence: Synthetic antibody
tcagtagacacgtccaagaaccaggtctccctgaacttgaggtctgtgaccgccgcagacacggccgtgtattactgtgcgagacatataggctacgggaacaactggttcgacccctggggccaggga

SEQ ID NO: 8775 - protein, 43 aa, Artificial Sequence
  Description of Artificial Sequence: Synthetic antibody
SVDTSKNQVSLNLRSVTAADTAVYYCARHIGYGNNWFDPWGQG

SEQ ID NO: 8776 - protein, 19 aa, Artificial Sequence
  Description of Artificial Sequence: Synthetic antibody
CAKLPTSGIRGQDNWLDPW

SEQ ID NO: 8777 - DNA, 129 bp, Artificial Sequence
  Description of Artificial Sequence: Synthetic antibody
tccaagaacatgttgtatctgcaaatgaccagcctgagagtcgaggacacggccatatatttctgtgcgaaactgccgacttcgggtatacgtggacaagataactggctcgacccctggggccagggc

SEQ ID NO: 8778 - protein, 43 aa, Artificial Sequence
  Description of Artificial Sequence: Synthetic antibody
SKNMLYLQMTSLRVEDTAIYFCAKLPTSGIRGQDNWLDPWGQG

SEQ ID NO: 8779 - DNA, 129 bp, Artificial Sequence
  Description of Artificial Sequence: Synthetic antibody
tccaagaacatgttgtatctgcaaatgaccagcctgagagccgaggacacggccatatatttctgtgcgaaactgccgacttcgggtatacgtggacaagataactggctcgacccctggggccagggc

SEQ ID NO: 8780 - protein, 43 aa, Artificial Sequence
  Description of Artificial Sequence: Synthetic antibody
SKNMLYLQMTSLRAEDTAIYFCAKLPTSGIRGQDNWLDPWGQG

SEQ ID NO: 8781 - protein, 12 aa, Artificial Sequence
  Description of Artificial Sequence: Synthetic antibody
CAREGWEHMDVW

SEQ ID NO: 8782 - DNA, 129 bp, Artificial Sequence
  Description of Artificial Sequence: Synthetic antibody
atcaccgtgacgatggacacatccgcgagcacaggctatatggagctgaggagcctgagagcagacgacacggccgtatattattgtgcgagagaggggtgggagcatatggacgtctggggccaaggg

SEQ ID NO: 8783 - protein, 43 aa, Artificial Sequence
  Description of Artificial Sequence: Synthetic antibody
ITVTMDTSASTGYMELRSLRADDTAVYYCAREGWEHMDVWGQG

SEQ ID NO: 8784 - DNA, 129 bp, Artificial Sequence
  Description of Artificial Sequence: Synthetic antibody
atcaccgtgacgatgcacacatccgcgagcacaggctatatggagctgaggagcctgagagcagacgacacggccgtatattattgtgcgagagaggggtgggagcatatggacgtctggggccaaggg

SEQ ID NO: 8785 - protein, 43 aa, Artificial Sequence
  Description of Artificial Sequence: Synthetic antibody
ITVTMHTSASTGYMELRSLRADDTAVYYCAREGWEHMDVWGQG

SEQ ID NO: 8786 - protein, 12 aa, Artificial Sequence
  Description of Artificial Sequence: Synthetic antibody
CANERGRLFDYW

SEQ ID NO: 8787 - DNA, 129 bp, Artificial Sequence
  Description of Artificial Sequence: Synthetic antibody
ttcaccatctccagagacaacggcaaaaactccctgtatctgcaaatgagcagtctgaaaactgaggacaccgccttgtattactgtgcaaacgaacgggggcgactatttgactactggggccaggga

SEQ ID NO: 8788 - protein, 43 aa, Artificial Sequence
  Description of Artificial Sequence: Synthetic antibody
FTISRDNGKNSLYLQMSSLKTEDTALYYCANERGRLFDYWGQG

SEQ ID NO: 8789 - DNA, 129 bp, Artificial Sequence
  Description of Artificial Sequence: Synthetic antibody
ttcaccatctccagagacaacagcaaaaactccctgtatctgcaaatgaacagtctgaaaactgaggacaccgccttgtattactgtgcaaacgaacgggggcgactatttgactactggggccaggga

SEQ ID NO: 8790 - protein, 43 aa, Artificial Sequence
  Description of Artificial Sequence: Synthetic antibody
FTISRDNSKNSLYLQMNSLKTEDTALYYCANERGRLFDYWGQG

SEQ ID NO: 8791 - protein, 21 aa, Artificial Sequence
  Description of Artificial Sequence: Synthetic antibody
CTTTYYDILTGYFLDRLVFYW

SEQ ID NO: 8792 - DNA, 129 bp, Artificial Sequence
  Description of Artificial Sequence: Synthetic antibody
aacacgctgtatctgcaaatgaacagcctgaaaaccgaggacacagccgtgtattactgtaccacaacctattacgatattttgactggttattttctggaccgcctcgtcttctactggggccaggga

SEQ ID NO: 8793 - protein, 43 aa, Artificial Sequence
  Description of Artificial Sequence: Synthetic antibody
NTLYLQMNSLKTEDTAVYYCTTTYYDILTGYFLDRLVFYWGQG

SEQ ID NO: 8794 - DNA, 129 bp, Artificial Sequence
  Description of Artificial Sequence: Synthetic antibody
aacacgctgtatctgcaaatgaacagcctgaaaaccgaggacacagccgtgtattactgtaccacaacctattacgatattttgactggctattttctggaccgcctcgtcttctactggggccaggga

SEQ ID NO: 8795 - protein, 18 aa, Artificial Sequence
  Description of Artificial Sequence: Synthetic antibody
CARGGRRWLQFRGGFDYW

SEQ ID NO: 8796 - DNA, 129 bp, Artificial Sequence
  Description of Artificial Sequence: Synthetic antibody
tcgtccaagaaccagttctccctgaagctgagctctgtgaccgccgcggacacggctgtgtattactgtgcgagaggagggaggagatggctacaatttagggggggctttgactactggggccaggga

SEQ ID NO: 8797 - protein, 43 aa, Artificial Sequence
  Description of Artificial Sequence: Synthetic antibody
SSKNQFSLKLSSVTAADTAVYYCARGGRRWLQFRGGFDYWGQG

SEQ ID NO: 8798 - DNA, 129 bp, Artificial Sequence
  Description of Artificial Sequence: Synthetic antibody
acgtccaagaaccagttctccctgaagctgagctctgtgaccgccgcggacacggctgtgtattactgtgcgagaggagggaggagatggctacaatttagggggggctttgactactggggccaggga

SEQ ID NO: 8799 - protein, 43 aa, Artificial Sequence
  Description of Artificial Sequence: Synthetic antibody
TSKNQFSLKLSSVTAADTAVYYCARGGRRWLQFRGGFDYWGQG

SEQ ID NO: 8800 - protein, 18 aa, Artificial Sequence
  Description of Artificial Sequence: Synthetic antibody
CARDREVAGTEANYFKDW

SEQ ID NO: 8801 - DNA, 129 bp, Artificial Sequence
  Description of Artificial Sequence: Synthetic antibody
acgtccacgaggacagtctacatggaactgagcagcctggcatctgatgacacggccgtgtactactgtgcgagagaccgggaagtggctggtacggaggcgaactactttaaagactggggccaggga

SEQ ID NO: 8802 - protein, 43 aa, Artificial Sequence
  Description of Artificial Sequence: Synthetic antibody
TSTRTVYMELSSLASDDTAVYYCARDREVAGTEANYFKDWGQG

SEQ ID NO: 8803 - DNA, 129 bp, Artificial Sequence
  Description of Artificial Sequence: Synthetic antibody
acgtccacgaggacagtctacatggaactgagcagcctgacatctgatgacacggccgtgtactactgtgcgagagaccgggaagtggctggtacggaggcgaactactttaaagactggggccaggga

SEQ ID NO: 8804 - protein, 43 aa, Artificial Sequence
  Description of Artificial Sequence: Synthetic antibody
TSTRTVYMELSSLTSDDTAVYYCARDREVAGTEANYFKDWGQG

SEQ ID NO: 8805 - protein, 13 aa, Artificial Sequence
  Description of Artificial Sequence: Synthetic antibody
CARDPYRGGMDVW

SEQ ID NO: 8806 - DNA, 129 bp, Artificial Sequence
  Description of Artificial Sequence: Synthetic antibody
tccatctccatagacaatgccaagaactcactgtatctgcaaatgaacagcctgagagacgaggacacggctgtgtattactgtgcgagagatccctaccgcggcggtatggacgtctggggccaaggg

SEQ ID NO: 8807 - protein, 43 aa, Artificial Sequence
  Description of Artificial Sequence: Synthetic antibody
SISIDNAKNSLYLQMNSLRDEDTAVYYCARDPYRGGMDVWGQG

SEQ ID NO: 8808 - DNA, 129 bp, Artificial Sequence
  Description of Artificial Sequence: Synthetic antibody
accatctccagagacaatgccaagaactcactgtatctgcaaatgaacagcctgagagacgaggacacggctgtgtattactgtgcgagagatccctaccgcggcggtatggacgtctggggccaaggg

SEQ ID NO: 8809 - protein, 43 aa, Artificial Sequence
  Description of Artificial Sequence: Synthetic antibody
TISRDNAKNSLYLQMNSLRDEDTAVYYCARDPYRGGMDVWGQG

SEQ ID NO: 8810 - protein, 25 aa, Artificial Sequence
  Description of Artificial Sequence: Synthetic antibody
CTRVRRGSGVAPYSSSWGRYYFDYW

SEQ ID NO: 8811 - DNA, 129 bp, Artificial Sequence
  Description of Artificial Sequence: Synthetic antibody
ctgcaaatgaacagcctgaaaaccgaggacacagccgtgtattactgtactagagttagaagagggtcgggggtggcgccgtatagcagcagctggggacggtactactttgactactggggccaggga

SEQ ID NO: 8812 - protein, 43 aa, Artificial Sequence
  Description of Artificial Sequence: Synthetic antibody
LQMNSLKTEDTAVYYCTRVRRGSGVAPYSSSWGRYYFDYWGQG

SEQ ID NO: 8813 - DNA, 129 bp, Artificial Sequence
  Description of Artificial Sequence: Synthetic antibody
ctgaaaatgaacagcctgaaaaccgaggacacagccgtgtattactgtactagagttagaagagggtcgggggtggcgccgtatagcagcagctggggacggtactactttgactactggggccaggga

SEQ ID NO: 8814 - protein, 43 aa, Artificial Sequence
  Description of Artificial Sequence: Synthetic antibody
LKMNSLKTEDTAVYYCTRVRRGSGVAPYSSSWGRYYFDYWGQG

SEQ ID NO: 8815 - protein, 18 aa, Artificial Sequence
  Description of Artificial Sequence: Synthetic antibody
CAKDYSKYGDYGGYFDLW

SEQ ID NO: 8816 - DNA, 129 bp, Artificial Sequence
  Description of Artificial Sequence: Synthetic antibody
aacgccaagaactccctgtatctgcaaatgaacagtctgagagctgaggacacggccttgtattactgtgcaaaagattattcgaagtacggtgactacgggggatacttcgatctctggggccgtggc

SEQ ID NO: 8817 - protein, 43 aa, Artificial Sequence
  Description of Artificial Sequence: Synthetic antibody
NAKNSLYLQMNSLRAEDTALYYCAKDYSKYGDYGGYFDLWGRG

SEQ ID NO: 8818 - DNA, 129 bp, Artificial Sequence
  Description of Artificial Sequence: Synthetic antibody
aacgccaagaactccctgtatctgcaaatgaacagtctgagagctgaggacacggccttgcattactgtgcaaaagattattcgaagtacggtgactacgggggatacttcgacctctggggccgtggc

SEQ ID NO: 8819 - protein, 43 aa, Artificial Sequence
  Description of Artificial Sequence: Synthetic antibody
NAKNSLYLQMNSLRAEDTALHYCAKDYSKYGDYGGYFDLWGRG

SEQ ID NO: 8820 - protein, 16 aa, Artificial Sequence
  Description of Artificial Sequence: Synthetic antibody
CAHGDDILTGYAFDIW

SEQ ID NO: 8821 - DNA, 129 bp, Artificial Sequence
  Description of Artificial Sequence: Synthetic antibody
caaggacacctccaaaaccaggtggtccttacaatgaccaacatggaccctgtggacacagccacatattactgtgcacacggtgacgatattttgactggttatgcttttgatatctggggccaaggg

SEQ ID NO: 8822 - protein, 43 aa, Artificial Sequence
  Description of Artificial Sequence: Synthetic antibody
QGHLQNQVVLTMTNMDPVDTATYYCAHGDDILTGYAFDIWGQG

SEQ ID NO: 8823 - DNA, 129 bp, Artificial Sequence
  Description of Artificial Sequence: Synthetic antibody
aaggacacctccaaaaaccaggtggtccttacaatgaccaacatggaccctgtggacacagccacatattactgtgcacacggtgacgatattttgactggttatgcttttgatatctggggccaaggg

SEQ ID NO: 8824 - protein, 43 aa, Artificial Sequence
  Description of Artificial Sequence: Synthetic antibody
KDTSKNQVVLTMTNMDPVDTATYYCAHGDDILTGYAFDIWGQG

SEQ ID NO: 8825 - protein, 21 aa, Artificial Sequence
  Description of Artificial Sequence: Synthetic antibody
CARDPHSTGVGWYGGAYFDYW

SEQ ID NO: 8826 - DNA, 129 bp, Artificial Sequence
  Description of Artificial Sequence: Synthetic antibody
aactccctgtatctgcaaatgaacagtctgagagccgaggacacggccttgtattactgtgcgagagacccccactccaccggggtcggctggtacgggggggcttactttgactactggggccaggga

SEQ ID NO: 8827 - protein, 43 aa, Artificial Sequence
  Description of Artificial Sequence: Synthetic antibody
NSLYLQMNSLRAEDTALYYCARDPHSTGVGWYGGAYFDYWGQG

SEQ ID NO: 8828 - DNA, 129 bp, Artificial Sequence
  Description of Artificial Sequence: Synthetic antibody
tactccctgtatctgcaaatgaacagtctgagagccgaggacacggccttgtattactgtgcgagagacccccactccaccggggtcggctggtacgggggggcttactttgactactggggccaggga

SEQ ID NO: 8829 - protein, 43 aa, Artificial Sequence
  Description of Artificial Sequence: Synthetic antibody
YSLYLQMNSLRAEDTALYYCARDPHSTGVGWYGGAYFDYWGQG

SEQ ID NO: 8830 - protein, 13 aa, Artificial Sequence
  Description of Artificial Sequence: Synthetic antibody
CAKEYSSSWFDPW

SEQ ID NO: 8831 - DNA, 129 bp, Artificial Sequence
  Description of Artificial Sequence: Synthetic antibody
tacatctccagagacaacgccaagaactccctgtatctgcaaatgaacagtctgagagctgaggacacggccttttattactgtgcaaaagaatatagcagctcctggttcgacccctggggccaggga

SEQ ID NO: 8832 - protein, 43 aa, Artificial Sequence
  Description of Artificial Sequence: Synthetic antibody
YISRDNAKNSLYLQMNSLRAEDTAFYYCAKEYSSSWFDPWGQG

SEQ ID NO: 8833 - DNA, 129 bp, Artificial Sequence
  Description of Artificial Sequence: Synthetic antibody
accatctccagagacaacgccaagaactccctgtatctgcaaatgaacagtctgagagctgaggacacggccttttattactgtgcaaaagaatatagcagctcctggttcgacccctggggccaggga

SEQ ID NO: 8834 - protein, 43 aa, Artificial Sequence
  Description of Artificial Sequence: Synthetic antibody
TISRDNAKNSLYLQMNSLRAEDTAFYYCAKEYSSSWFDPWGQG

SEQ ID NO: 8835 - protein, 26 aa, Artificial Sequence
  Description of Artificial Sequence: Synthetic antibody
CARDARGVRWYTYYYGSGSSYGMDVW

SEQ ID NO: 8836 - DNA, 129 bp, Artificial Sequence
  Description of Artificial Sequence: Synthetic antibody
caaatgaacagtctgagagccgaggacgcggccttgtattactgtgcgagagatgccaggggtgtcaggtggtacacgtattactatggttcggggagttcttacggtatggacgtctggggccaaggg

SEQ ID NO: 8837 - protein, 43 aa, Artificial Sequence
  Description of Artificial Sequence: Synthetic antibody
QMNSLRAEDAALYYCARDARGVRWYTYYYGSGSSYGMDVWGQG

SEQ ID NO: 8838 - DNA, 129 bp, Artificial Sequence
  Description of Artificial Sequence: Synthetic antibody
caaatgaacagtctgagagccgaggacacggccttgtattactgtgcgagagatgccaggggtgtcagatggtacacgtattactatggttcggggagttcttacggtatggacgtctggggccaaggg

SEQ ID NO: 8839 - protein, 43 aa, Artificial Sequence
  Description of Artificial Sequence: Synthetic antibody
QMNSLRAEDTALYYCARDARGVRWYTYYYGSGSSYGMDVWGQG

SEQ ID NO: 8840 - protein, 19 aa, Artificial Sequence
  Description of Artificial Sequence: Synthetic antibody
CGRDARSSGYNGYDLFDIW

SEQ ID NO: 8841 - DNA, 129 bp, Artificial Sequence
  Description of Artificial Sequence: Synthetic antibody
tccatcagcacagccttcatggaacttagcagtctaagatatgacgacacggccgtatattactgtgggagagatgcacggtctagtggctacaatggatatgatttgtttgatatctggggccaaggg

SEQ ID NO: 8842 - protein, 43 aa, Artificial Sequence
  Description of Artificial Sequence: Synthetic antibody
SISTAFMELSSLRYDDTAVYYCGRDARSSGYNGYDLFDIWGQG

SEQ ID NO: 8843 - DNA, 129 bp, Artificial Sequence
  Description of Artificial Sequence: Synthetic antibody
cccatcagcacagccttcatggaacttagcagtctaagatatgacgacacggccgtatattactgtgggagagatgcacggtctagtggctacaatggatatgatttgtttgatatctggggccaaggg

SEQ ID NO: 8844 - protein, 43 aa, Artificial Sequence
  Description of Artificial Sequence: Synthetic antibody
PISTAFMELSSLRYDDTAVYYCGRDARSSGYNGYDLFDIWGQG

SEQ ID NO: 8845 - protein, 18 aa, Artificial Sequence
  Description of Artificial Sequence: Synthetic antibody
CAREWITMVQGRDGMDVW

SEQ ID NO: 8846 - DNA, 129 bp, Artificial Sequence
  Description of Artificial Sequence: Synthetic antibody
aacgccaagaacacgctgtatctgcaaatgaacagtctgagagccgaagacacggctgtgtatttctgtgcaagagagtggattactatggttcaggggcgagacggtatggacgtctggggccaaggg

SEQ ID NO: 8847 - protein, 43 aa, Artificial Sequence
  Description of Artificial Sequence: Synthetic antibody
NAKNTLYLQMNSLRAEDTAVYFCAREWITMVQGRDGMDVWGQG

SEQ ID NO: 8848 - DNA, 129 bp, Artificial Sequence
  Description of Artificial Sequence: Synthetic antibody
aacgccaagaacacgctgtatctgcaaatgaacagtccgagagccgaagacacggctgtgtatttctgtgcaagagagtggattactatggttcaggggcgagacggtatggacgtctggggccaaggg

SEQ ID NO: 8849 - protein, 43 aa, Artificial Sequence
  Description of Artificial Sequence: Synthetic antibody
NAKNTLYLQMNSPRAEDTAVYFCAREWITMVQGRDGMDVWGQG

SEQ ID NO: 8850 - protein, 13 aa, Artificial Sequence
  Description of Artificial Sequence: Synthetic antibody
CARTTPFGWYDYW

SEQ ID NO: 8851 - DNA, 129 bp, Artificial Sequence
  Description of Artificial Sequence: Synthetic antibody
tgtatctcaatagatgattcaaagaactcactgtatctgcaaatgaacagcctgaaaaccgaggacacggccgtgtactactgtgctaggacgaccccctttggctggtacgactactggggccaggga

SEQ ID NO: 8852 - protein, 43 aa, Artificial Sequence
  Description of Artificial Sequence: Synthetic antibody
CISIDDSKNSLYLQMNSLKTEDTAVYYCARTTPFGWYDYWGQG

SEQ ID NO: 8853 - DNA, 129 bp, Artificial Sequence
  Description of Artificial Sequence: Synthetic antibody
agtatctcaagagatgattcaaagaactcactgtatctgcaaatgaacagcctgaaaaccgaggacacggccgtgtactactgtgctaggacgaccccctttggctggtacgactactggggccaggga

SEQ ID NO: 8854 - protein, 43 aa, Artificial Sequence
  Description of Artificial Sequence: Synthetic antibody
SISRDDSKNSLYLQMNSLKTEDTAVYYCARTTPFGWYDYWGQG

SEQ ID NO: 8855 - protein, 12 aa, Artificial Sequence
  Description of Artificial Sequence: Synthetic antibody
CAKDYEAAAGTW

SEQ ID NO: 8856 - DNA, 129 bp, Artificial Sequence
  Description of Artificial Sequence: Synthetic antibody
ttcaccatctccagatataattccaagaacgcgctgtatctgcaaatgaacagcctgagagccgaggacacggccgtatattactgtgcgaaagattacgaagcagcagctggtacctggggccaggga

SEQ ID NO: 8857 - protein, 43 aa, Artificial Sequence
  Description of Artificial Sequence: Synthetic antibody
FTISRYNSKNALYLQMNSLRAEDTAVYYCAKDYEAAAGTWGQG

SEQ ID NO: 8858 - DNA, 129 bp, Artificial Sequence
  Description of Artificial Sequence: Synthetic antibody
ttcaccatctccagagataattccaagaacgcgctgtatctgcaaatgaacagcctgagagccgaggacacggccgtatattactgtgcgaaagattacgaagcagcagctggtacctggggccaggga

SEQ ID NO: 8859 - protein, 43 aa, Artificial Sequence
  Description of Artificial Sequence: Synthetic antibody
FTISRDNSKNALYLQMNSLRAEDTAVYYCAKDYEAAAGTWGQG

SEQ ID NO: 8860 - protein, 17 aa, Artificial Sequence
  Description of Artificial Sequence: Synthetic antibody
CARGGRGYSSSWSLDYW

SEQ ID NO: 8861 - DNA, 129 bp, Artificial Sequence
  Description of Artificial Sequence: Synthetic antibody
gacacatccaagaaccagttctccctgcagctgaactctgtgactcccgaggacacggctgtgtattactgtgcaagagggggtcgggggtatagcagcagctggtcccttgactactggggccaggga

SEQ ID NO: 8862 - protein, 43 aa, Artificial Sequence
  Description of Artificial Sequence: Synthetic antibody
DTSKNQFSLQLNSVTPEDTAVYYCARGGRGYSSSWSLDYWGQG

SEQ ID NO: 8863 - DNA, 129 bp, Artificial Sequence
  Description of Artificial Sequence: Synthetic antibody
gacacatccaagaaccagttctccctgcagctgaactctgtgactcccgaggacacggctgtgtattactgtgcaagaggggggcgggggtatagcagcagctggtcccttgactactggggccaggga

SEQ ID NO: 8864 - protein, 17 aa, Artificial Sequence
  Description of Artificial Sequence: Synthetic antibody
CAKDMVYTSGGGALDYW

SEQ ID NO: 8865 - DNA, 129 bp, Artificial Sequence
  Description of Artificial Sequence: Synthetic antibody
gacaacgtcaagaactccctgtatctgcaaatgaacagtctgagacctgaggacacggccttatattactgtgcaaaagatatggtgtataccagtggagggggggctcttgactactggggccaggga

SEQ ID NO: 8866 - protein, 43 aa, Artificial Sequence
  Description of Artificial Sequence: Synthetic antibody
DNVKNSLYLQMNSLRPEDTALYYCAKDMVYTSGGGALDYWGQG

SEQ ID NO: 8867 - DNA, 129 bp, Artificial Sequence
  Description of Artificial Sequence: Synthetic antibody
gacaacgtcaacaactccctgtatctgcaaatgaacagtctgagacctgaggacacggccttatattactgtgcaaaagatatggtgtataccagtggagggggggctcttgactactggggccaggga

SEQ ID NO: 8868 - protein, 43 aa, Artificial Sequence
  Description of Artificial Sequence: Synthetic antibody
DNVNNSLYLQMNSLRPEDTALYYCAKDMVYTSGGGALDYWGQG

SEQ ID NO: 8869 - protein, 13 aa, Artificial Sequence
  Description of Artificial Sequence: Synthetic antibody
CTVVIPSTPFEYW

SEQ ID NO: 8870 - DNA, 129 bp, Artificial Sequence
  Description of Artificial Sequence: Synthetic antibody
actatgaccacagacacatccacgaacacagcctacatggagctgaggggtctgagatctgacgacacggccgtgtatcgctgtacggtagtgattccttctacgccctttgaatattggggccaggga

SEQ ID NO: 8871 - protein, 43 aa, Artificial Sequence
  Description of Artificial Sequence: Synthetic antibody
TMTTDTSTNTAYMELRGLRSDDTAVYRCTVVIPSTPFEYWGQG

SEQ ID NO: 8872 - DNA, 129 bp, Artificial Sequence
  Description of Artificial Sequence: Synthetic antibody
aatatgaccacagacacatccacgaacacagcctacatggagctgaggggtctgagatctgacgacacggccgtgtatcgctgtacggtagtgattccttctacgccctttgaatattggggccaggga

SEQ ID NO: 8873 - protein, 43 aa, Artificial Sequence
  Description of Artificial Sequence: Synthetic antibody
NMTTDTSTNTAYMELRGLRSDDTAVYRCTVVIPSTPFEYWGQG

SEQ ID NO: 8874 - protein, 18 aa, Artificial Sequence
  Description of Artificial Sequence: Synthetic antibody
CARVRCSGGSCYSVGDYW

SEQ ID NO: 8875 - DNA, 129 bp, Artificial Sequence
  Description of Artificial Sequence: Synthetic antibody
acgtccacgagcacagtctacatggaggtgagcagcctgagatctgaggacacggccgtgtattactgtgcgcgagtgcgctgtagtggtggtagttgctactccgtcggggactactggggccaggga

SEQ ID NO: 8876 - protein, 43 aa, Artificial Sequence
  Description of Artificial Sequence: Synthetic antibody
TSTSTVYMEVSSLRSEDTAVYYCARVRCSGGSCYSVGDYWGQG

SEQ ID NO: 8877 - DNA, 129 bp, Artificial Sequence
  Description of Artificial Sequence: Synthetic antibody
acgtccacgagcacagtctacatggaggtgagcagcctgagatctgaggacacggccgtgtattactgtgcgcgagtgcgctgtagtggtggtagctgctactccgtcggggactactggggccaggga

SEQ ID NO: 8878 - protein, 18 aa, Artificial Sequence
  Description of Artificial Sequence: Synthetic antibody
CAKGVDSSGWREGAFDIW

SEQ ID NO: 8879 - DNA, 129 bp, Artificial Sequence
  Description of Artificial Sequence: Synthetic antibody
aattccaagaacacgctgtatctgcaaatgaacagcctgagagccgaggacacggccgtatattactgtgcgaaaggagtggatagcagtggctggcgagaaggagcttttgatatctggggccaaggg

SEQ ID NO: 8880 - protein, 43 aa, Artificial Sequence
  Description of Artificial Sequence: Synthetic antibody
NSKNTLYLQMNSLRAEDTAVYYCAKGVDSSGWREGAFDIWGQG

SEQ ID NO: 8881 - DNA, 129 bp, Artificial Sequence
  Description of Artificial Sequence: Synthetic antibody
aattccaagaacacgatgtatctgcaaatgaacagcctgagagccgaggacacggccgtatattactgtgcgaaaggagtggatagcagtggctggcgagaaggagcttttgatatctggggccaaggg

SEQ ID NO: 8882 - protein, 43 aa, Artificial Sequence
  Description of Artificial Sequence: Synthetic antibody
NSKNTMYLQMNSLRAEDTAVYYCAKGVDSSGWREGAFDIWGQG

SEQ ID NO: 8883 - protein, 22 aa, Artificial Sequence
  Description of Artificial Sequence: Synthetic antibody
CAKERGGYYDSSGYSADAFDIW

SEQ ID NO: 8884 - DNA, 129 bp, Artificial Sequence
  Description of Artificial Sequence: Synthetic antibody
acgctgtgtctgcaaatgaacagcctgagagccgaggacacggccgtatattactgtgcgaaagagagggggggttactatgatagtagtggttattcggcggatgcttttgatatctggggccaaggg

SEQ ID NO: 8885 - protein, 43 aa, Artificial Sequence
  Description of Artificial Sequence: Synthetic antibody
TLCLQMNSLRAEDTAVYYCAKERGGYYDSSGYSADAFDIWGQG

SEQ ID NO: 8886 - DNA, 129 bp, Artificial Sequence
  Description of Artificial Sequence: Synthetic antibody
acgctgtatctgcaaatgaacagcctgagagccgaggacacggccgtatattactgtgcgaaagagagggggggttactatgatagtagtggttattcggcggatgcttttgatatctggggccaaggg

SEQ ID NO: 8887 - protein, 43 aa, Artificial Sequence
  Description of Artificial Sequence: Synthetic antibody
TLYLQMNSLRAEDTAVYYCAKERGGYYDSSGYSADAFDIWGQG

SEQ ID NO: 8888 - protein, 22 aa, Artificial Sequence
  Description of Artificial Sequence: Synthetic antibody
CATDYCSITGCNGGYYYGMVVW

SEQ ID NO: 8889 - DNA, 129 bp, Artificial Sequence
  Description of Artificial Sequence: Synthetic antibody
acagtatacatggaactgagtagcctgacatctgaggacacggccgtgtattattgtgcgacagattattgcagcattaccggctgtaatggaggctactactatggtatggtcgtctggggccaaggg

SEQ ID NO: 8890 - protein, 43 aa, Artificial Sequence
  Description of Artificial Sequence: Synthetic antibody
TVYMELSSLTSEDTAVYYCATDYCSITGCNGGYYYGMVVWGQG

SEQ ID NO: 8891 - DNA, 129 bp, Artificial Sequence
  Description of Artificial Sequence: Synthetic antibody
aaagtatacatggaactgagtagcctgacatctgaggacacggccgtgtattattgtgcgacagattattgcagcattaccggctgtaatggaggctactactatggtatggtcgtctggggccaaggg

SEQ ID NO: 8892 - protein, 43 aa, Artificial Sequence
  Description of Artificial Sequence: Synthetic antibody
KVYMELSSLTSEDTAVYYCATDYCSITGCNGGYYYGMVVWGQG

SEQ ID NO: 8893 - protein, 25 aa, Artificial Sequence
  Description of Artificial Sequence: Synthetic antibody
CARGGYCSGGSCYSNYYYYYGMDVW

SEQ ID NO: 8894 - DNA, 129 bp, Artificial Sequence
  Description of Artificial Sequence: Synthetic antibody
ttggagctgaggagcctgagatctgacgacacggccgtgtattactgtgcgagggggggatattgtagtggtggtagctgctactccaattactactactactacggtatggacgtctggggccaaggg

SEQ ID NO: 8895 - protein, 43 aa, Artificial Sequence
  Description of Artificial Sequence: Synthetic antibody
LELRSLRSDDTAVYYCARGGYCSGGSCYSNYYYYYGMDVWGQG

SEQ ID NO: 8896 - DNA, 129 bp, Artificial Sequence
  Description of Artificial Sequence: Synthetic antibody
atggagctgaggagcctgagatctgacgacacggccgtgtattactgtgcgagggggggatattgtagtggtggtagctgctactccaattactactactactacggtatggacgtctggggccaaggg

SEQ ID NO: 8897 - protein, 43 aa, Artificial Sequence
  Description of Artificial Sequence: Synthetic antibody
MELRSLRSDDTAVYYCARGGYCSGGSCYSNYYYYYGMDVWGQG

SEQ ID NO: 8898 - protein, 20 aa, Artificial Sequence
  Description of Artificial Sequence: Synthetic antibody
CAKDNGGWLAYYYYYGMDVW

SEQ ID NO: 8899 - DNA, 129 bp, Artificial Sequence
  Description of Artificial Sequence: Synthetic antibody
tacaacacgctgtatctgcaaatgaacagcctgagagccgaggacacggccgtatattactgtgcgaaagataatggggggtggctagcatactactactactacggtatggacgtctggggccaaggg

SEQ ID NO: 8900 - protein, 43 aa, Artificial Sequence
  Description of Artificial Sequence: Synthetic antibody
YNTLYLQMNSLRAEDTAVYYCAKDNGGWLAYYYYYGMDVWGQG

SEQ ID NO: 8901 - DNA, 129 bp, Artificial Sequence
  Description of Artificial Sequence: Synthetic antibody
aagaacacgctgtatctgcaaatgaacagcctgagagccgaggacacggccgtatattactgtgcgaaagataatggggggtggctagcatactactactactacggtatggacgtctggggccaaggg

SEQ ID NO: 8902 - protein, 43 aa, Artificial Sequence
  Description of Artificial Sequence: Synthetic antibody
KNTLYLQMNSLRAEDTAVYYCAKDNGGWLAYYYYYGMDVWGQG

SEQ ID NO: 8903 - protein, 20 aa, Artificial Sequence
  Description of Artificial Sequence: Synthetic antibody
CARSGHSYDFWSEVYWFDPW

SEQ ID NO: 8904 - DNA, 129 bp, Artificial Sequence
  Description of Artificial Sequence: Synthetic antibody
caagaaccagttctcctgaagctgagctctgtgaccgccgcggacacggccgtgtattactgtgcgagatcgggccactcctacgatttttggagtgaggtttactggttcgacccctggggccaggga

SEQ ID NO: 8905 - protein, 43 aa, Artificial Sequence
  Description of Artificial Sequence: Synthetic antibody
QEPVLLKLSSVTAADTAVYYCARSGHSYDFWSEVYWFDPWGQG

SEQ ID NO: 8906 - DNA, 129 bp, Artificial Sequence
  Description of Artificial Sequence: Synthetic antibody
aagaaccagttctccctgaagctgagctctgtgaccgccgcggacacggccgtgtattactgtgcgagatcgggccactcctacgatttttggagtgaggtttactggttcgacccctggggccaggga

SEQ ID NO: 8907 - protein, 43 aa, Artificial Sequence
  Description of Artificial Sequence: Synthetic antibody
KNQFSLKLSSVTAADTAVYYCARSGHSYDFWSEVYWFDPWGQG

SEQ ID NO: 8908 - protein, 17 aa, Artificial Sequence
  Description of Artificial Sequence: Synthetic antibody
CAKDIRPHTRPYGMDVW

SEQ ID NO: 8909 - DNA, 129 bp, Artificial Sequence
  Description of Artificial Sequence: Synthetic antibody
agacaacgccaagaactcctgtatctgcaaatgaacagtctgagagctgaggacacggccttgtattactgtgcaaaagatataaggccgcacacccggccctacggtatggacgtctggggccaaggg

SEQ ID NO: 8910 - protein, 43 aa, Artificial Sequence
  Description of Artificial Sequence: Synthetic antibody
RQRQELLYLQMNSLRAEDTALYYCAKDIRPHTRPYGMDVWGQG

SEQ ID NO: 8911 - DNA, 129 bp, Artificial Sequence
  Description of Artificial Sequence: Synthetic antibody
gacaacgccaagaactccctgtatctgcaaatgaacagtctgagagctgaggacacggccttgtattactgtgcaaaagatataaggccgcacacccggccctacggtatggacgtctggggccaaggg

SEQ ID NO: 8912 - protein, 43 aa, Artificial Sequence
  Description of Artificial Sequence: Synthetic antibody
DNAKNSLYLQMNSLRAEDTALYYCAKDIRPHTRPYGMDVWGQG

SEQ ID NO: 8913 - protein, 21 aa, Artificial Sequence
  Description of Artificial Sequence: Synthetic antibody
CAKDQDYDILTGFEKYGMDVW

SEQ ID NO: 8914 - DNA, 129 bp, Artificial Sequence
  Description of Artificial Sequence: Synthetic antibody
aacacgctgtatctgcaaatgaacagcctgagagccgaggacacggctgtgtattactgtgcgaaagatcaggattacgatattttgactggtttcgaaaaatacggtatggatgtctggggccaaggg

SEQ ID NO: 8915 - protein, 43 aa, Artificial Sequence
  Description of Artificial Sequence: Synthetic antibody
NTLYLQMNSLRAEDTAVYYCAKDQDYDILTGFEKYGMDVWGQG

SEQ ID NO: 8916 - DNA, 129 bp, Artificial Sequence
  Description of Artificial Sequence: Synthetic antibody
aacacgctgtatctgcaaatgaacagcctgagagccgaggacacggctgtgtattactgtgcgaaagatcaagattacgatattttgactggtttcgaaaaatacggtatggacgtctggggccaaggg

SEQ ID NO: 8917 - protein, 25 aa, Artificial Sequence
  Description of Artificial Sequence: Synthetic antibody
CARGEGYYDFWSGYRRYYYYGMDVW

SEQ ID NO: 8918 - DNA, 129 bp, Artificial Sequence
  Description of Artificial Sequence: Synthetic antibody
ttggagctgaggagcctgagatctgacgacacggccgtgtattactgtgcgagaggagaggggtattacgatttttggagtggttaccgccgctactactactacggtatggacgtctggggccaaggg

SEQ ID NO: 8919 - protein, 43 aa, Artificial Sequence
  Description of Artificial Sequence: Synthetic antibody
LELRSLRSDDTAVYYCARGEGYYDFWSGYRRYYYYGMDVWGQG

SEQ ID NO: 8920 - DNA, 129 bp, Artificial Sequence
  Description of Artificial Sequence: Synthetic antibody
atggagctgaggagcctgagatctgacgacacggccgtgtattactgtgcgagaggagaggggtattacgatttttggagtggttaccgccgctactactactacggtatggacgtctggggccaaggg

SEQ ID NO: 8921 - protein, 43 aa, Artificial Sequence
  Description of Artificial Sequence: Synthetic antibody
MELRSLRSDDTAVYYCARGEGYYDFWSGYRRYYYYGMDVWGQG

SEQ ID NO: 8922 - protein, 16 aa, Artificial Sequence
  Description of Artificial Sequence: Synthetic antibody
CARSQIVVVIAYFDYW

SEQ ID NO: 8923 - DNA, 129 bp, Artificial Sequence
  Description of Artificial Sequence: Synthetic antibody
tgggacacgtccacgagcacagtctacatggagctgagcagcctgagatctgaggacacggccgtgtattactgtgcgaggagtcagatagtagtggttatcgcttactttgactactggggccaggga

SEQ ID NO: 8924 - protein, 43 aa, Artificial Sequence
  Description of Artificial Sequence: Synthetic antibody
WDTSTSTVYMELSSLRSEDTAVYYCARSQIVVVIAYFDYWGQG

SEQ ID NO: 8925 - DNA, 129 bp, Artificial Sequence
  Description of Artificial Sequence: Synthetic antibody
agggacacgtccacgagcacagtctacatggagctgagcagcctgagatctgaggacacggccgtgtattactgtgcgaggagtcagatagtagtggttatcgcttactttgactactggggccaggga

SEQ ID NO: 8926 - protein, 43 aa, Artificial Sequence
  Description of Artificial Sequence: Synthetic antibody
RDTSTSTVYMELSSLRSEDTAVYYCARSQIVVVIAYFDYWGQG

SEQ ID NO: 8927 - protein, 17 aa, Artificial Sequence
  Description of Artificial Sequence: Synthetic antibody
CARLGPIAAAGGPFDYW

SEQ ID NO: 8928 - DNA, 129 bp, Artificial Sequence
  Description of Artificial Sequence: Synthetic antibody
gacacgtccaagaaccagttctccctgaagctgacctctgtgaccgccgcagacacggctgtgtattactgtgcgagactggggcccatagcagcagctgggggaccttttgactactggggccaggga

SEQ ID NO: 8929 - protein, 43 aa, Artificial Sequence
  Description of Artificial Sequence: Synthetic antibody
DTSKNQFSLKLTSVTAADTAVYYCARLGPIAAAGGPFDYWGQG

SEQ ID NO: 8930 - DNA, 129 bp, Artificial Sequence
  Description of Artificial Sequence: Synthetic antibody
gacacgtccaagaaccagttctccctgaagctgacctctgtgaccgccgcagacacggctgtgtactactgtgcgagactggggcccatagcagcagctgggggaccttttgactactggggccaggga

SEQ ID NO: 8931 - protein, 20 aa, Artificial Sequence
  Description of Artificial Sequence: Synthetic antibody
CARDRLEYSSSDDWDPFDYW

SEQ ID NO: 8932 - DNA, 129 bp, Artificial Sequence
  Description of Artificial Sequence: Synthetic antibody
tcgagcacagcctacatggagctgagcagcctgagatctgaggacacggccgtgtattactgtgcgagagatcggctcgagtatagcagctccgacgactgggacccctttgactactggggccaggga

SEQ ID NO: 8933 - protein, 43 aa, Artificial Sequence
  Description of Artificial Sequence: Synthetic antibody
SSTAYMELSSLRSEDTAVYYCARDRLEYSSSDDWDPFDYWGQG

SEQ ID NO: 8934 - DNA, 129 bp, Artificial Sequence
  Description of Artificial Sequence: Synthetic antibody
acgagcacagcctacatggagctgagcagcctgagatctgaggacacggccgtgtattactgtgcgagagatcggctcgagtatagcagctccgacgactgggacccctttgactactggggccaggga

SEQ ID NO: 8935 - protein, 43 aa, Artificial Sequence
  Description of Artificial Sequence: Synthetic antibody
TSTAYMELSSLRSEDTAVYYCARDRLEYSSSDDWDPFDYWGQG

SEQ ID NO: 8936 - protein, 15 aa, Artificial Sequence
  Description of Artificial Sequence: Synthetic antibody
CARDLRGLVRAFDIW

SEQ ID NO: 8937 - DNA, 129 bp, Artificial Sequence
  Description of Artificial Sequence: Synthetic antibody
tcagttgactcgtccaagaaccagttctccctgaagctgagctctgtgaccgccgcggacacggccgtgtattactgtgcgagagatctgagggggctggtacgtgcttttgatatctggggccaaggg

SEQ ID NO: 8938 - protein, 43 aa, Artificial Sequence
  Description of Artificial Sequence: Synthetic antibody
SVDSSKNQFSLKLSSVTAADTAVYYCARDLRGLVRAFDIWGQG

SEQ ID NO: 8939 - DNA, 129 bp, Artificial Sequence
  Description of Artificial Sequence: Synthetic antibody
tcagtagacacgtccaagaaccagttctccctgaagctgagctctgtgaccgccgcggacacggccgtgtattactgtgcgagagatctgagggggctggtacgtgcttttgatatctggggccaaggg

SEQ ID NO: 8940 - protein, 43 aa, Artificial Sequence
  Description of Artificial Sequence: Synthetic antibody
SVDTSKNQFSLKLSSVTAADTAVYYCARDLRGLVRAFDIWGQG

SEQ ID NO: 8941 - protein, 13 aa, Artificial Sequence
  Description of Artificial Sequence: Synthetic antibody
CVRLAAADGFDYW

SEQ ID NO: 8942 - DNA, 129 bp, Artificial Sequence
  Description of Artificial Sequence: Synthetic antibody
aaccatcagccagacacatccaagaaccagttctccctgcagctgaaatatgtgactcccgaggacacggctgtgtattactgtgtaagattggcagcagctgacggctttgactactggggccaggga

SEQ ID NO: 8943 - protein, 43 aa, Artificial Sequence
  Description of Artificial Sequence: Synthetic antibody
NHQPDTSKNQFSLQLKYVTPEDTAVYYCVRLAAADGFDYWGQG

SEQ ID NO: 8944 - DNA, 129 bp, Artificial Sequence
  Description of Artificial Sequence: Synthetic antibody
accatcagcccagacacatccaagaaccagttctccctgcagctgaaatatgtgactcccgaggacacggctgtgtattactgtgtaagattggcagcagctgacggctttgactactggggccaggga

SEQ ID NO: 8945 - protein, 43 aa, Artificial Sequence
  Description of Artificial Sequence: Synthetic antibody
TISPDTSKNQFSLQLKYVTPEDTAVYYCVRLAAADGFDYWGQG

SEQ ID NO: 8946 - protein, 14 aa, Artificial Sequence
  Description of Artificial Sequence: Synthetic antibody
CASWDSEGWYFDYW

SEQ ID NO: 8947 - DNA, 129 bp, Artificial Sequence
  Description of Artificial Sequence: Synthetic antibody
attaccgcggacaaatccacgagcacagcctacatggagctgagcagcctgagatctgaggacacggccgtgtattactgtgcgagttgggatagcgaggggtggtactttgactactggggccaggga

SEQ ID NO: 8948 - protein, 43 aa, Artificial Sequence
  Description of Artificial Sequence: Synthetic antibody
ITADKSTSTAYMELSSLRSEDTAVYYCASWDSEGWYFDYWGQG

SEQ ID NO: 8949 - DNA, 129 bp, Artificial Sequence
  Description of Artificial Sequence: Synthetic antibody
attaccgcgcacaaatccacgagcacagcctacatggagctgagcagcctgagatctgaggacacggccgtgtattactgtgcgagttgggatagcgaggggtggtactttgactactggggccaggga

SEQ ID NO: 8950 - protein, 43 aa, Artificial Sequence
  Description of Artificial Sequence: Synthetic antibody
ITAHKSTSTAYMELSSLRSEDTAVYYCASWDSEGWYFDYWGQG

SEQ ID NO: 8951 - protein, 21 aa, Artificial Sequence
  Description of Artificial Sequence: Synthetic antibody
CAHDRKISLYGFYYYYGMDVW

SEQ ID NO: 8952 - DNA, 129 bp, Artificial Sequence
  Description of Artificial Sequence: Synthetic antibody
aaccaggtggtcctaacaatgaccaacatggaccctgtggacacagccacatattactgtgcacacgaccggaaaatatcgctctacgggttctactactactatggcatggacgtctggggccaaggg

SEQ ID NO: 8953 - protein, 43 aa, Artificial Sequence
  Description of Artificial Sequence: Synthetic antibody
NQVVLTMTNMDPVDTATYYCAHDRKISLYGFYYYYGMDVWGQG

SEQ ID NO: 8954 - DNA, 129 bp, Artificial Sequence
  Description of Artificial Sequence: Synthetic antibody
aacaaggtggtcctaacaatgaccaacatggaccctgtgtacacagccacatattactgtgcacacgaccggaaaatatcgctctacgggttctactactactatggcatggacgtctggggccaaggg

SEQ ID NO: 8955 - protein, 43 aa, Artificial Sequence
  Description of Artificial Sequence: Synthetic antibody
NKVVLTMTNMDPVYTATYYCAHDRKISLYGFYYYYGMDVWGQG

SEQ ID NO: 8956 - protein, 26 aa, Artificial Sequence
  Description of Artificial Sequence: Synthetic antibody
CARDAPYYDILTGYSDPYYYYGMDVW

SEQ ID NO: 8957 - DNA, 129 bp, Artificial Sequence
  Description of Artificial Sequence: Synthetic antibody
gtgctgaggagcctgagatctgacgacacggccgtgtattactgtgcgagagatgccccatattacgatattttgactggttattccgacccttactactactacggtatggacgtctggggccaaggg

SEQ ID NO: 8958 - protein, 43 aa, Artificial Sequence
  Description of Artificial Sequence: Synthetic antibody
VLRSLRSDDTAVYYCARDAPYYDILTGYSDPYYYYGMDVWGQG

SEQ ID NO: 8959 - DNA, 129 bp, Artificial Sequence
  Description of Artificial Sequence: Synthetic antibody
gagctgaggagcctgagatctgacgacacggccgtgtattactgtgcgagagatgccccatattacgatattttgactggttattccgacccttactactactacggtatggacgtctggggccaaggg

SEQ ID NO: 8960 - protein, 43 aa, Artificial Sequence
  Description of Artificial Sequence: Synthetic antibody
ELRSLRSDDTAVYYCARDAPYYDILTGYSDPYYYYGMDVWGQG

SEQ ID NO: 8961 - protein, 15 aa, Artificial Sequence
  Description of Artificial Sequence: Synthetic antibody
CARDSGKNYYGMDVW

SEQ ID NO: 8962 - DNA, 129 bp, Artificial Sequence
  Description of Artificial Sequence: Synthetic antibody
tccagagataattccaagaacacgctgtatctgcaaatgaacagcctgagaggcgaggacacggccgtatattactgtgcgagagattccggtaaaaactactacggtatggacgtctggggccaaggg

SEQ ID NO: 8963 - protein, 43 aa, Artificial Sequence
  Description of Artificial Sequence: Synthetic antibody
SRDNSKNTLYLQMNSLRGEDTAVYYCARDSGKNYYGMDVWGQG

SEQ ID NO: 8964 - DNA, 129 bp, Artificial Sequence
  Description of Artificial Sequence: Synthetic antibody
tccagagataattccaacaacacgctgtatctgcaaatgaacagcctgagaggcgaggacacggccgtatattactgtgcgagagattccggtaaaaactactacggtatggacgtctggggccaaggg

SEQ ID NO: 8965 - protein, 43 aa, Artificial Sequence
  Description of Artificial Sequence: Synthetic antibody
SRDNSNNTLYLQMNSLRGEDTAVYYCARDSGKNYYGMDVWGQG

SEQ ID NO: 8966 - protein, 16 aa, Artificial Sequence
  Description of Artificial Sequence: Synthetic antibody
CAHSHDSSRRSPFDYW

SEQ ID NO: 8967 - DNA, 129 bp, Artificial Sequence
  Description of Artificial Sequence: Synthetic antibody
caaggacacctccaaaaccaggtggtccttacaatgaccaacatggaccctgtggacacagccacatattactgtgcacacagtcatgatagtagtcggaggtccccctttgactactggggccaggga

SEQ ID NO: 8968 - protein, 43 aa, Artificial Sequence
  Description of Artificial Sequence: Synthetic antibody
QGHLQNQVVLTMTNMDPVDTATYYCAHSHDSSRRSPFDYWGQG

SEQ ID NO: 8969 - DNA, 129 bp, Artificial Sequence
  Description of Artificial Sequence: Synthetic antibody
aaggacacctccaaaaaccaggtggtccttacaatgaccaacatggaccctgtggacacagccacatattactgtgcacacagtcatgatagtagtcggaggtccccctttgactactggggccaggga

SEQ ID NO: 8970 - protein, 43 aa, Artificial Sequence
  Description of Artificial Sequence: Synthetic antibody
KDTSKNQVVLTMTNMDPVDTATYYCAHSHDSSRRSPFDYWGQG

SEQ ID NO: 8971 - protein, 17 aa, Artificial Sequence
  Description of Artificial Sequence: Synthetic antibody
CAKDRIALDGLWDSDYW

SEQ ID NO: 8972 - DNA, 129 bp, Artificial Sequence
  Description of Artificial Sequence: Synthetic antibody
gacgactccaagaacacgatgtttctccacatgaacagactgagagtcgacgacacggccgtatatttctgtgcgaaagaccgcattgcccttgatggcctctgggactctgactactggggccaggga

SEQ ID NO: 8973 - protein, 43 aa, Artificial Sequence
  Description of Artificial Sequence: Synthetic antibody
DDSKNTMFLHMNRLRVDDTAVYFCAKDRIALDGLWDSDYWGQG

SEQ ID NO: 8974 - protein, 17 aa, Artificial Sequence
  Description of Artificial Sequence: Synthetic antibody
CAREGGTTVATGRFDPW

SEQ ID NO: 8975 - DNA, 129 bp, Artificial Sequence
  Description of Artificial Sequence: Synthetic antibody
cacacatccacgaccacagcctacatggagctgaggagcctgagatctgacgacacggccgtctactactgtgcgagagagggtggcactacggtggctactggacggttcgacccctggggccaggga

SEQ ID NO: 8976 - protein, 43 aa, Artificial Sequence
  Description of Artificial Sequence: Synthetic antibody
HTSTTTAYMELRSLRSDDTAVYYCAREGGTTVATGRFDPWGQG

SEQ ID NO: 8977 - DNA, 129 bp, Artificial Sequence
  Description of Artificial Sequence: Synthetic antibody
gacacatccacgaccacagcctacatggagctgaggagcctgagatctgacgacacggccgtctactactgtgcgagagagggtggcactacggtggctactggacggttcgacccctggggccaggga

SEQ ID NO: 8978 - protein, 43 aa, Artificial Sequence
  Description of Artificial Sequence: Synthetic antibody
DTSTTTAYMELRSLRSDDTAVYYCAREGGTTVATGRFDPWGQG

SEQ ID NO: 8979 - protein, 13 aa, Artificial Sequence
  Description of Artificial Sequence: Synthetic antibody
CAREKYGDEIDYW

SEQ ID NO: 8980 - DNA, 129 bp, Artificial Sequence
  Description of Artificial Sequence: Synthetic antibody
accatgacctgggacacgtccacgagcacagtctacttggagctgagcagcctgagatctgaggacacggccgtgtattactgtgcgagagagaaatacggtgacgagattgactactggggccaggga

SEQ ID NO: 8981 - protein, 43 aa, Artificial Sequence
  Description of Artificial Sequence: Synthetic antibody
TMTWDTSTSTVYLELSSLRSEDTAVYYCAREKYGDEIDYWGQG

SEQ ID NO: 8982 - DNA, 129 bp, Artificial Sequence
  Description of Artificial Sequence: Synthetic antibody
accatgaccagggacacgtccacgagcacagtctacatggagctgagcagcctgagatctgaggacacggccgtgtattactgtgcgagagagaaatacggtgacgagattgactactggggccaggga

SEQ ID NO: 8983 - protein, 43 aa, Artificial Sequence
  Description of Artificial Sequence: Synthetic antibody
TMTRDTSTSTVYMELSSLRSEDTAVYYCAREKYGDEIDYWGQG

SEQ ID NO: 8984 - protein, 13 aa, Artificial Sequence
  Description of Artificial Sequence: Synthetic antibody
CARGRNSGSYYPW

SEQ ID NO: 8985 - DNA, 129 bp, Artificial Sequence
  Description of Artificial Sequence: Synthetic antibody
accatgaccaggaacacctccataagcacagcctacatggagctgagcagcctgagatctgaggacacggccgtgtattactgtgcgagaggacgaaatagtgggagctactacccttggggccaggga

SEQ ID NO: 8986 - protein, 43 aa, Artificial Sequence
  Description of Artificial Sequence: Synthetic antibody
TMTRNTSISTAYMELSSLRSEDTAVYYCARGRNSGSYYPWGQG

SEQ ID NO: 8987 - DNA, 129 bp, Artificial Sequence
  Description of Artificial Sequence: Synthetic antibody
accatgaccagcaacacctccataagcacagcctacatggagctgagcagcctgagatctgaggacacggccgtgtattactgtgcgagaggacgaaatagtgggagctactacccttggggccaggga

SEQ ID NO: 8988 - protein, 43 aa, Artificial Sequence
  Description of Artificial Sequence: Synthetic antibody
TMTSNTSISTAYMELSSLRSEDTAVYYCARGRNSGSYYPWGQG

SEQ ID NO: 8989 - protein, 15 aa, Artificial Sequence
  Description of Artificial Sequence: Synthetic antibody
CAHSRDSSSWYVDYW

SEQ ID NO: 8990 - DNA, 129 bp, Artificial Sequence
  Description of Artificial Sequence: Synthetic antibody
accaaggacacctccaaaaaccaggtggtccttacaatgaccaacatggaccctgtggacacagccacatattactgtgcacacagtagggatagcagcagctggtatgttgactactggggccaggga

SEQ ID NO: 8991 - protein, 43 aa, Artificial Sequence
  Description of Artificial Sequence: Synthetic antibody
TKDTSKNQVVLTMTNMDPVDTATYYCAHSRDSSSWYVDYWGQG

SEQ ID NO: 8992 - DNA, 129 bp, Artificial Sequence
  Description of Artificial Sequence: Synthetic antibody
accaaggacacctccaaaaaccaggtggtccttacaatgaccaacatggaccctgtggacacagccacatattactgtgcacacagtagggacagcagcagctggtatgttgactactggggccaggga

SEQ ID NO: 8993 - protein, 15 aa, Artificial Sequence
  Description of Artificial Sequence: Synthetic antibody
CARIPDYGSGSKNYW

SEQ ID NO: 8994 - DNA, 129 bp, Artificial Sequence
  Description of Artificial Sequence: Synthetic antibody
tccagagataattccaagaacacgctgtatctgcaaatgaacagcctgagagccgaggacacggccgtatattactgtgcgaggatacccgactatggttcggggagtaagaactactggggccaggga

SEQ ID NO: 8995 - protein, 43 aa, Artificial Sequence
  Description of Artificial Sequence: Synthetic antibody
SRDNSKNTLYLQMNSLRAEDTAVYYCARIPDYGSGSKNYWGQG

SEQ ID NO: 8996 - DNA, 129 bp, Artificial Sequence
  Description of Artificial Sequence: Synthetic antibody
tacagagataattccaagaacacgctgtatctgaaaatgaacagcctgagagccgaggacacggccgtatattactgtgcgaggatacccgactatggttcggggagtaagaactactggggccaggga

SEQ ID NO: 8997 - protein, 43 aa, Artificial Sequence
  Description of Artificial Sequence: Synthetic antibody
YRDNSKNTLYLKMNSLRAEDTAVYYCARIPDYGSGSKNYWGQG

SEQ ID NO: 8998 - protein, 15 aa, Artificial Sequence
  Description of Artificial Sequence: Synthetic antibody
CMHDFWNGMVGFDFW

SEQ ID NO: 8999 - DNA, 129 bp, Artificial Sequence
  Description of Artificial Sequence: Synthetic antibody
tccagagatgattcaaagggtacggcgtatctgcaaatgaacagtctgaaaagcgaggacacggccgtgtattattgtatgcacgatttttggaatggtatggttggatttgacttctggggccaggga

SEQ ID NO: 9000 - protein, 43 aa, Artificial Sequence
  Description of Artificial Sequence: Synthetic antibody
SRDDSKGTAYLQMNSLKSEDTAVYYCMHDFWNGMVGFDFWGQG

SEQ ID NO: 9001 - DNA, 129 bp, Artificial Sequence
  Description of Artificial Sequence: Synthetic antibody
tccagagatgattcaaagggtacggcgtatctgaaaatgaacagtctcaaaagcgaggacacggccgtgtattattgtatgcacgatttttggaatggtatggttggatttgacttctggggccaggga

SEQ ID NO: 9002 - protein, 43 aa, Artificial Sequence
  Description of Artificial Sequence: Synthetic antibody
SRDDSKGTAYLKMNSLKSEDTAVYYCMHDFWNGMVGFDFWGQG

SEQ ID NO: 9003 - protein, 14 aa, Artificial Sequence
  Description of Artificial Sequence: Synthetic antibody
CARGQSVAGGFDYW

SEQ ID NO: 9004 - DNA, 129 bp, Artificial Sequence
  Description of Artificial Sequence: Synthetic antibody
atctccatagaaaatgccaagaactccttgtatcttcaaatgaacagcctgagagccggtgacacggctgtgtattactgtgcaagaggtcaaagcgtggctggcggttttgactactggggccaggga

SEQ ID NO: 9005 - protein, 43 aa, Artificial Sequence
  Description of Artificial Sequence: Synthetic antibody
ISIENAKNSLYLQMNSLRAGDTAVYYCARGQSVAGGFDYWGQG

SEQ ID NO: 9006 - DNA, 129 bp, Artificial Sequence
  Description of Artificial Sequence: Synthetic antibody
atctccagagaaaatgccaagaactccttgtatcttcaaatgaacagcctgagagccggggacacggctgtgtattactgtgcaagaggtcaaagcgtggctggcggttttgactactggggccaggga

SEQ ID NO: 9007 - protein, 43 aa, Artificial Sequence
  Description of Artificial Sequence: Synthetic antibody
ISRENAKNSLYLQMNSLRAGDTAVYYCARGQSVAGGFDYWGQG

SEQ ID NO: 9008 - protein, 21 aa, Artificial Sequence
  Description of Artificial Sequence: Synthetic antibody
CAREGGYGSGSFHYYYGMDVW

SEQ ID NO: 9009 - DNA, 129 bp, Artificial Sequence
  Description of Artificial Sequence: Synthetic antibody
tgcacagtctacttggagctgagcagcctgagatctgaggacacggccgtgtattactgtgcgagagagggaggctatggttcggggagttttcactactactacggtatggacgtctggggccaaggg

SEQ ID NO: 9010 - protein, 43 aa, Artificial Sequence
  Description of Artificial Sequence: Synthetic antibody
CTVYLELSSLRSEDTAVYYCAREGGYGSGSFHYYYGMDVWGQG

SEQ ID NO: 9011 - DNA, 129 bp, Artificial Sequence
  Description of Artificial Sequence: Synthetic antibody
agcacagtctacatggagctgagcagcctgagatctgaggacacggccgtgtattactgtgcgagagagggaggctatggttcggggagttttcactactactacggtatggacgtctggggccaaggg

SEQ ID NO: 9012 - protein, 43 aa, Artificial Sequence
  Description of Artificial Sequence: Synthetic antibody
STVYMELSSLRSEDTAVYYCAREGGYGSGSFHYYYGMDVWGQG

SEQ ID NO: 9013 - protein, 20 aa, Artificial Sequence
  Description of Artificial Sequence: Synthetic antibody
CAKGGGYDILTGYLGGMDVW

SEQ ID NO: 9014 - DNA, 129 bp, Artificial Sequence
  Description of Artificial Sequence: Synthetic antibody
aaggactccctgtatctgcaaatgaacagtctgagagctgaggacacggccttgtattactgtgcaaaaggagggggttacgatattttgactggttaccttgggggtatggacgtctggggccaaggg

SEQ ID NO: 9015 - protein, 43 aa, Artificial Sequence
  Description of Artificial Sequence: Synthetic antibody
KDSLYLQMNSLRAEDTALYYCAKGGGYDILTGYLGGMDVWGQG

SEQ ID NO: 9016 - DNA, 129 bp, Artificial Sequence
  Description of Artificial Sequence: Synthetic antibody
aagaactccctgtatctgcaaatgaacagtctgagagctgaggacacggccttgtattactgtgcaaaaggagggggttacgatattttgactggttaccttgggggtatggacgtctggggccaaggg

SEQ ID NO: 9017 - protein, 43 aa, Artificial Sequence
  Description of Artificial Sequence: Synthetic antibody
KNSLYLQMNSLRAEDTALYYCAKGGGYDILTGYLGGMDVWGQG

SEQ ID NO: 9018 - protein, 21 aa, Artificial Sequence
  Description of Artificial Sequence: Synthetic antibody
CTRGYSSGWSPRYYYYGMDVW

SEQ ID NO: 9019 - DNA, 129 bp, Artificial Sequence
  Description of Artificial Sequence: Synthetic antibody
aacacggcgtatctgcaaatgaacagcctgaaaaccgaggacacggccgtgtattactgtactagggggtatagcagtggctggtcaccacgttactactactacggtatggacgtctggggccaaggg

SEQ ID NO: 9020 - protein, 43 aa, Artificial Sequence
  Description of Artificial Sequence: Synthetic antibody
NTAYLQMNSLKTEDTAVYYCTRGYSSGWSPRYYYYGMDVWGQG

SEQ ID NO: 9021 - DNA, 129 bp, Artificial Sequence
  Description of Artificial Sequence: Synthetic antibody
tacacggcgtatctgcaaatgaacagcctgaaaaccgaggacacggccgtgtattactgtactagggggtatagcagtggctggtcaccacgttactactactacggtatggacgtctggggccaaggg

SEQ ID NO: 9022 - protein, 43 aa, Artificial Sequence
  Description of Artificial Sequence: Synthetic antibody
YTAYLQMNSLKTEDTAVYYCTRGYSSGWSPRYYYYGMDVWGQG

SEQ ID NO: 9023 - protein, 21 aa, Artificial Sequence
  Description of Artificial Sequence: Synthetic antibody
CARHSDPAVAGRYYYYGMDVW

SEQ ID NO: 9024 - DNA, 129 bp, Artificial Sequence
  Description of Artificial Sequence: Synthetic antibody
aaccagttctccctgaagctgggctctgtgaccgccgcagacacggctgtgtattactgtgcgagacattcggacccagcagtggctggtcgctactactactacggtatggacgtctggggccaaggg

SEQ ID NO: 9025 - protein, 43 aa, Artificial Sequence
  Description of Artificial Sequence: Synthetic antibody
NQFSLKLGSVTAADTAVYYCARHSDPAVAGRYYYYGMDVWGQG

SEQ ID NO: 9026 - DNA, 129 bp, Artificial Sequence
  Description of Artificial Sequence: Synthetic antibody
aaccagttctccctgaagctgagctctgtgaccgccgcagacacggctgtgtattactgtgcgagacattcggacccagcagtggctggtcgctactactactacggtatggacgtctggggccaaggg

SEQ ID NO: 9027 - protein, 43 aa, Artificial Sequence
  Description of Artificial Sequence: Synthetic antibody
NQFSLKLSSVTAADTAVYYCARHSDPAVAGRYYYYGMDVWGQG

SEQ ID NO: 9028 - protein, 16 aa, Artificial Sequence
  Description of Artificial Sequence: Synthetic antibody
CARGPVGATTAARDYW

SEQ ID NO: 9029 - DNA, 129 bp, Artificial Sequence
  Description of Artificial Sequence: Synthetic antibody
tgcaacacctccataagcacagcctacatggagctgagcagcctgagatctgaggacacggccgtgtattactgtgcgagaggtccagtgggagctactacagccgcgcgggactactggggccaggga

SEQ ID NO: 9030 - protein, 43 aa, Artificial Sequence
  Description of Artificial Sequence: Synthetic antibody
CNTSISTAYMELSSLRSEDTAVYYCARGPVGATTAARDYWGQG

SEQ ID NO: 9031 - DNA, 129 bp, Artificial Sequence
  Description of Artificial Sequence: Synthetic antibody
aggaacacctccataagcacagcctacatggagctgagcagcctgagatctgaggacacggccgtgtattactgtgcgagaggtccagtgggagctactacagccgcgcgggactactggggccaggga

SEQ ID NO: 9032 - protein, 43 aa, Artificial Sequence
  Description of Artificial Sequence: Synthetic antibody
RNTSISTAYMELSSLRSEDTAVYYCARGPVGATTAARDYWGQG

SEQ ID NO: 9033 - protein, 18 aa, Artificial Sequence
  Description of Artificial Sequence: Synthetic antibody
CGREGQEDGDYGTHIDSW

SEQ ID NO: 9034 - DNA, 129 bp, Artificial Sequence
  Description of Artificial Sequence: Synthetic antibody
acgtccaataatcaattctcccttaaactgggctctgtgaccgaggcggacacggccgtctactattgtgggagagaagggcaggaagacggtgactacgggacacacattgactcctggggccaggga

SEQ ID NO: 9035 - protein, 43 aa, Artificial Sequence
  Description of Artificial Sequence: Synthetic antibody
TSNNQFSLKLGSVTEADTAVYYCGREGQEDGDYGTHIDSWGQG

SEQ ID NO: 9036 - DNA, 129 bp, Artificial Sequence
  Description of Artificial Sequence: Synthetic antibody
acgtccaataatcaattctcccttaaactgggctctgtgaccgaagcggacacggccgtctactattgtgggagagaagggcaggaagacggtgactacgggacacacattgactcctggggccaggga

SEQ ID NO: 9037 - protein, 20 aa, Artificial Sequence
  Description of Artificial Sequence: Synthetic antibody
CARDQTVVTGDYYYYGMDVW

SEQ ID NO: 9038 - DNA, 129 bp, Artificial Sequence
  Description of Artificial Sequence: Synthetic antibody
aagaacacgctgtatctgcaaatgaacagtctgagagccgaggacacggctgtgtattactgtgcaagagatcaaacggtggtaaccggggattactactactacggtatggacgtctggggccaaggg

SEQ ID NO: 9039 - protein, 43 aa, Artificial Sequence
  Description of Artificial Sequence: Synthetic antibody
KNTLYLQMNSLRAEDTAVYYCARDQTVVTGDYYYYGMDVWGQG

SEQ ID NO: 9040 - DNA, 129 bp, Artificial Sequence
  Description of Artificial Sequence: Synthetic antibody
aagaacacgctgtatctgcaaatgaacagtctgagagccgaggacacggctgtgcattactgtgcaagagatcaaacggtggtaaccggggattactactactacggtatggacgtctggggccaaggg

SEQ ID NO: 9041 - protein, 43 aa, Artificial Sequence
  Description of Artificial Sequence: Synthetic antibody
KNTLYLQMNSLRAEDTAVHYCARDQTVVTGDYYYYGMDVWGQG

SEQ ID NO: 9042 - protein, 15 aa, Artificial Sequence
  Description of Artificial Sequence: Synthetic antibody
CARDRPNCLSCLDYW

SEQ ID NO: 9043 - DNA, 129 bp, Artificial Sequence
  Description of Artificial Sequence: Synthetic antibody
tacccagacacatccaagaaccagttctccctgcagctgaactctgtgactcccgaggactctgctgtgtattactgtgcaagagaccgtcctaactgcctaagttgtttagactactggggccaggga

SEQ ID NO: 9044 - protein, 43 aa, Artificial Sequence
  Description of Artificial Sequence: Synthetic antibody
YPDTSKNQFSLQLNSVTPEDSAVYYCARDRPNCLSCLDYWGQG

SEQ ID NO: 9045 - DNA, 129 bp, Artificial Sequence
  Description of Artificial Sequence: Synthetic antibody
aacccagacacatccaagaaccagttctccctgcagctgaactctgtgactcccgaggactcggctgtgtattactgtgcaagagaccgtcctaactgcctaagttgtttagactactggggccaggga

SEQ ID NO: 9046 - protein, 43 aa, Artificial Sequence
  Description of Artificial Sequence: Synthetic antibody
NPDTSKNQFSLQLNSVTPEDSAVYYCARDRPNCLSCLDYWGQG

SEQ ID NO: 9047 - protein, 18 aa, Artificial Sequence
  Description of Artificial Sequence: Synthetic antibody
CARAEQWLVLGILDFDYW

SEQ ID NO: 9048 - DNA, 129 bp, Artificial Sequence
  Description of Artificial Sequence: Synthetic antibody
tcatccacgagcacagcctacatggagctgaggagcctgagatctgacgacacggccgtgtattactgtgcgagagccgagcagtggctggtactcgggatcctggactttgactactggggccaggga

SEQ ID NO: 9049 - protein, 43 aa, Artificial Sequence
  Description of Artificial Sequence: Synthetic antibody
SSTSTAYMELRSLRSDDTAVYYCARAEQWLVLGILDFDYWGQG

SEQ ID NO: 9050 - DNA, 129 bp, Artificial Sequence
  Description of Artificial Sequence: Synthetic antibody
acatccacgagcacagcctacatggagctgaggagcctgagatctgacgacacggccgtgtattactgtgcgagagccgagcagtggctggtactcgggatcctggactttgactactggggccaggga

SEQ ID NO: 9051 - protein, 43 aa, Artificial Sequence
  Description of Artificial Sequence: Synthetic antibody
TSTSTAYMELRSLRSDDTAVYYCARAEQWLVLGILDFDYWGQG

SEQ ID NO: 9052 - protein, 19 aa, Artificial Sequence
  Description of Artificial Sequence: Synthetic antibody
CTRHLWDSSGYYYYYFDYW

SEQ ID NO: 9053 - DNA, 129 bp, Artificial Sequence
  Description of Artificial Sequence: Synthetic antibody
tcaaagaacacggcgtatctgcaaatgaacagcctgaaaaccgaggacacggccgtgtattactgtactagacatctctgggatagtagtggttattactactactactttgactactggggccaggga

SEQ ID NO: 9054 - protein, 43 aa, Artificial Sequence
  Description of Artificial Sequence: Synthetic antibody
SKNTAYLQMNSLKTEDTAVYYCTRHLWDSSGYYYYYFDYWGQG

SEQ ID NO: 9055 - DNA, 129 bp, Artificial Sequence
  Description of Artificial Sequence: Synthetic antibody
caaagaaccacggcgtatctgcaaatgaacagcctgaaaaccgaggacacggccgtgtattactgtactagacatctctgggatagtagtggttattactactactactttgactactggggccaggga

SEQ ID NO: 9056 - protein, 43 aa, Artificial Sequence
  Description of Artificial Sequence: Synthetic antibody
QRTTAYLQMNSLKTEDTAVYYCTRHLWDSSGYYYYYFDYWGQG

SEQ ID NO: 9057 - protein, 15 aa, Artificial Sequence
  Description of Artificial Sequence: Synthetic antibody
CARTGSGRSDWFDPW

SEQ ID NO: 9058 - DNA, 129 bp, Artificial Sequence
  Description of Artificial Sequence: Synthetic antibody
ctccaaggacacctccaaaaccaggtggtccttacaatgaccaacatggaccctgtggacacagccacgtattactgtgcacggacaggttcggggaggtcagactggttcgacccctggggccaggga

SEQ ID NO: 9059 - protein, 43 aa, Artificial Sequence
  Description of Artificial Sequence: Synthetic antibody
LQGHLQNQVVLTMTNMDPVDTATYYCARTGSGRSDWFDPWGQG

SEQ ID NO: 9060 - DNA, 129 bp, Artificial Sequence
  Description of Artificial Sequence: Synthetic antibody
tccaaggacacctccaaaaaccaggtggtccttacaatgaccaacatggaccctgtggacacagccacgtattactgtgcacggacaggttcggggaggtcagactggttcgacccctggggccaggga

SEQ ID NO: 9061 - protein, 43 aa, Artificial Sequence
  Description of Artificial Sequence: Synthetic antibody
SKDTSKNQVVLTMTNMDPVDTATYYCARTGSGRSDWFDPWGQG

SEQ ID NO: 9062 - protein, 13 aa, Artificial Sequence
  Description of Artificial Sequence: Synthetic antibody
CAKDSGDDYSNYW

SEQ ID NO: 9063 - DNA, 129 bp, Artificial Sequence
  Description of Artificial Sequence: Synthetic antibody
accatctccagagacaattccaagaacacgctgtatctgcaaatgaacagcctgagagccgaggacacggccgtatattactgtgcgaaagattccggggatgactacagtaactactggggccaggga

SEQ ID NO: 9064 - protein, 43 aa, Artificial Sequence
  Description of Artificial Sequence: Synthetic antibody
TISRDNSKNTLYLQMNSLRAEDTAVYYCAKDSGDDYSNYWGQG

SEQ ID NO: 9065 - DNA, 129 bp, Artificial Sequence
  Description of Artificial Sequence: Synthetic antibody
accatctccagagacaattccaagaacacgctgtatctgcaaatgaacagcctgagagccgaggacacggccgtatattactgtgcgaaagattccggggatgactacagtaactactggagccaggga

SEQ ID NO: 9066 - protein, 43 aa, Artificial Sequence
  Description of Artificial Sequence: Synthetic antibody
TISRDNSKNTLYLQMNSLRAEDTAVYYCAKDSGDDYSNYWSQG

SEQ ID NO: 9067 - protein, 12 aa, Artificial Sequence
  Description of Artificial Sequence: Synthetic antibody
CAKGGVESGDFW

SEQ ID NO: 9068 - DNA, 129 bp, Artificial Sequence
  Description of Artificial Sequence: Synthetic antibody
ttcaccatctccagatataattccaagaatatggtgtttctgcaagtgaacagcctgagagtcgaggacacggccatatattactgtgcgaaagggggggtcgagagcggagacttctggggccaggga

SEQ ID NO: 9069 - protein, 43 aa, Artificial Sequence
  Description of Artificial Sequence: Synthetic antibody
FTISRYNSKNMVFLQVNSLRVEDTAIYYCAKGGVESGDFWGQG

SEQ ID NO: 9070 - DNA, 129 bp, Artificial Sequence
  Description of Artificial Sequence: Synthetic antibody
ttcaccatctccagagataattccaagaatatggtgtttctgcaagtgaacagcctgagagtcgaggacacggccatatattactgtgcgaaagggggggtcgagagcggagacttctggggccaggga

SEQ ID NO: 9071 - protein, 43 aa, Artificial Sequence
  Description of Artificial Sequence: Synthetic antibody
FTISRDNSKNMVFLQVNSLRVEDTAIYYCAKGGVESGDFWGQG

SEQ ID NO: 9072 - protein, 16 aa, Artificial Sequence
  Description of Artificial Sequence: Synthetic antibody
CAKQYSSGSTYYFDYW

SEQ ID NO: 9073 - DNA, 129 bp, Artificial Sequence
  Description of Artificial Sequence: Synthetic antibody
agagagaaatccaagaccacgctgtatctgcaaatgaacagcctgagggtcgacgacacggccgtatattactgtgcgaagcagtatagcagcggctccacatattactttgactactggggccaggga

SEQ ID NO: 9074 - protein, 43 aa, Artificial Sequence
  Description of Artificial Sequence: Synthetic antibody
REKSKTTLYLQMNSLRVDDTAVYYCAKQYSSGSTYYFDYWGQG

SEQ ID NO: 9075 - DNA, 129 bp, Artificial Sequence
  Description of Artificial Sequence: Synthetic antibody
agagagaaatccaagaccacgctgtatctgcaaatgaacagcctgagagtcgacgacacggccgtatattactgtgcgaagcagtatagcagcggctccacatattactttgactactggggccaggga

SEQ ID NO: 9076 - protein, 18 aa, Artificial Sequence
  Description of Artificial Sequence: Synthetic antibody
CARMLPPMSLGYYGMDVW

SEQ ID NO: 9077 - DNA, 129 bp, Artificial Sequence
  Description of Artificial Sequence: Synthetic antibody
aattccaagaacacgctgtatctgcaaatgaacagtctgagagccgaggacacggctgtgtattactgtgcaaggatgctacccccaatgagtctgggctactacggtatggacgtctggggccaaggg

SEQ ID NO: 9078 - protein, 43 aa, Artificial Sequence
  Description of Artificial Sequence: Synthetic antibody
NSKNTLYLQMNSLRAEDTAVYYCARMLPPMSLGYYGMDVWGQG

SEQ ID NO: 9079 - DNA, 129 bp, Artificial Sequence
  Description of Artificial Sequence: Synthetic antibody
aacgccaagaacacgctgtatctgcaaatgaacagtctgagagccgaggacacggctgtgtattactgtgcaaggatgctacccccaatgagtctgggctactacggtatggacgtctggggccaaggg

SEQ ID NO: 9080 - protein, 43 aa, Artificial Sequence
  Description of Artificial Sequence: Synthetic antibody
NAKNTLYLQMNSLRAEDTAVYYCARMLPPMSLGYYGMDVWGQG

SEQ ID NO: 9081 - protein, 15 aa, Artificial Sequence
  Description of Artificial Sequence: Synthetic antibody
CAKPYDSNLGYFQHW

SEQ ID NO: 9082 - DNA, 129 bp, Artificial Sequence
  Description of Artificial Sequence: Synthetic antibody
tccagagacaattccaagaacacgctgtatctgcaaatgaacagcctgagagccgaggacacggccgtatattactgtgcgaaaccgtatgacagtaacttagggtacttccagcactggggccagggc

SEQ ID NO: 9083 - protein, 43 aa, Artificial Sequence
  Description of Artificial Sequence: Synthetic antibody
SRDNSKNTLYLQMNSLRAEDTAVYYCAKPYDSNLGYFQHWGQG

SEQ ID NO: 9084 - DNA, 129 bp, Artificial Sequence
  Description of Artificial Sequence: Synthetic antibody
tccagagacaattccaagaacacgctgtatctacaaatgaacagcctgagagccgaggacacggccgtatattactgtgcgaaaccgtatgacagtaacttagggtacttccagcactggggccagggc

SEQ ID NO: 9085 - protein, 22 aa, Artificial Sequence
  Description of Artificial Sequence: Synthetic antibody
CARDLALYDILTARGAEYFQHW

SEQ ID NO: 9086 - DNA, 129 bp, Artificial Sequence
  Description of Artificial Sequence: Synthetic antibody
tcactgtatctgcaaatgaacagcctgagagacgaggacacggctgtgtattactgtgcgagagatctcgccctatacgatattttgacggccaggggggctgaatacttccagcactggggccagggc

SEQ ID NO: 9087 - protein, 43 aa, Artificial Sequence
  Description of Artificial Sequence: Synthetic antibody
SLYLQMNSLRDEDTAVYYCARDLALYDILTARGAEYFQHWGQG

SEQ ID NO: 9088 - DNA, 129 bp, Artificial Sequence
  Description of Artificial Sequence: Synthetic antibody
tcaatgtatctgcaaatgaacagcctgagagacgaggacacggctgtgtattactgtgcgagagatctcgccctatacgatattttgacggccaggggggctgaatacttccagcactggggccagggc

SEQ ID NO: 9089 - protein, 43 aa, Artificial Sequence
  Description of Artificial Sequence: Synthetic antibody
SMYLQMNSLRDEDTAVYYCARDLALYDILTARGAEYFQHWGQG

SEQ ID NO: 9090 - protein, 21 aa, Artificial Sequence
  Description of Artificial Sequence: Synthetic antibody
CAHSLVDIVATTPSYWYFDLW

SEQ ID NO: 9091 - DNA, 129 bp, Artificial Sequence
  Description of Artificial Sequence: Synthetic antibody
ttccaggtggtccttacaatgaccaacatggaccctgtggacacagccacatattactgtgctcactccctcgtggatatagtggctacgacaccaagctactggtacttcgatctctggggccgtggc

SEQ ID NO: 9092 - protein, 43 aa, Artificial Sequence
  Description of Artificial Sequence: Synthetic antibody
FQVVLTMTNMDPVDTATYYCAHSLVDIVATTPSYWYFDLWGRG

SEQ ID NO: 9093 - DNA, 129 bp, Artificial Sequence
  Description of Artificial Sequence: Synthetic antibody
aaccaggtggtccttacaatgaccaacatggaccctgtggacacagccacatattactgtgctcactccctcgtggatatagtggctacgacaccaagctactggtacttcgatctctggggccgtggc

SEQ ID NO: 9094 - protein, 43 aa, Artificial Sequence
  Description of Artificial Sequence: Synthetic antibody
NQVVLTMTNMDPVDTATYYCAHSLVDIVATTPSYWYFDLWGRG

SEQ ID NO: 9095 - protein, 24 aa, Artificial Sequence
  Description of Artificial Sequence: Synthetic antibody
CAKDWSYCSSTSCYFYSVGWFDPW

SEQ ID NO: 9096 - DNA, 129 bp, Artificial Sequence
  Description of Artificial Sequence: Synthetic antibody
tttctgaaaatgaacagcctgagagccgaggacacggccgtatattactgtgcgaaagattggtcgtattgtagtagtaccagctgctatttttactcggttggctggttcgacccctggggccaggga

SEQ ID NO: 9097 - protein, 43 aa, Artificial Sequence
  Description of Artificial Sequence: Synthetic antibody
FLKMNSLRAEDTAVYYCAKDWSYCSSTSCYFYSVGWFDPWGQG

SEQ ID NO: 9098 - DNA, 129 bp, Artificial Sequence
  Description of Artificial Sequence: Synthetic antibody
tatctgcaaatgaacagcctgagagccgaggacacggccgtatattactgtgcgaaagattggtcgtattgtagtagtaccagctgctatttttactcggttggctggttcgacccctggggccaggga

SEQ ID NO: 9099 - protein, 43 aa, Artificial Sequence
  Description of Artificial Sequence: Synthetic antibody
YLQMNSLRAEDTAVYYCAKDWSYCSSTSCYFYSVGWFDPWGQG

SEQ ID NO: 9100 - protein, 20 aa, Artificial Sequence
  Description of Artificial Sequence: Synthetic antibody
CARGHGSGLLGYYYYGLDVW

SEQ ID NO: 9101 - DNA, 129 bp, Artificial Sequence
  Description of Artificial Sequence: Synthetic antibody
aataacacgctttatctacaaatgagcagtctgagagctgaggacacggctgtatattactgtgcccgaggccatggttcgggattattgggctactactactacggtctggacgtctggggccagggg

SEQ ID NO: 9102 - protein, 43 aa, Artificial Sequence
  Description of Artificial Sequence: Synthetic antibody
NNTLYLQMSSLRAEDTAVYYCARGHGSGLLGYYYYGLDVWGQG

SEQ ID NO: 9103 - DNA, 129 bp, Artificial Sequence
  Description of Artificial Sequence: Synthetic antibody
aataacacgctgtatctacaaatgagcagtctgagagctgaggacacggctgtatattactgtgcccgaggccatggttcgggattattgggctactactactacggtctggacgtctggggccagggg

SEQ ID NO: 9104 - protein, 13 aa, Artificial Sequence
  Description of Artificial Sequence: Synthetic antibody
CARPDDYYGMDVW

SEQ ID NO: 9105 - DNA, 129 bp, Artificial Sequence
  Description of Artificial Sequence: Synthetic antibody
acgattaccgcggacaaatccacgagcacagcctacatggagctgagcagcctgagatctgaggacacggccgtgtattactgtgcgagaccagacgactactacggtatggacgtctggggccaaggg

SEQ ID NO: 9106 - protein, 43 aa, Artificial Sequence
  Description of Artificial Sequence: Synthetic antibody
TITADKSTSTAYMELSSLRSEDTAVYYCARPDDYYGMDVWGQG

SEQ ID NO: 9107 - DNA, 129 bp, Artificial Sequence
  Description of Artificial Sequence: Synthetic antibody
acgattaccgcgcacaaatccacgagcacagcctacatggagctgagcagcctgagatctgaggacacggccgtgtattactgtgcgagaccagacgactactacggtatggacgtctggggccaaggg

SEQ ID NO: 9108 - protein, 43 aa, Artificial Sequence
  Description of Artificial Sequence: Synthetic antibody
TITAHKSTSTAYMELSSLRSEDTAVYYCARPDDYYGMDVWGQG

SEQ ID NO: 9109 - protein, 19 aa, Artificial Sequence
  Description of Artificial Sequence: Synthetic antibody
CARHEGTDIVVVPAALDYW

SEQ ID NO: 9110 - DNA, 129 bp, Artificial Sequence
  Description of Artificial Sequence: Synthetic antibody
tccaggaaccagttctccctgaagctgagctctgtgaccgccgcagacacggctgtgtattactgtgcgagacatgaggggaccgatattgtagtagtaccagctgcccttgactactggggccaggga

SEQ ID NO: 9111 - protein, 43 aa, Artificial Sequence
  Description of Artificial Sequence: Synthetic antibody
SRNQFSLKLSSVTAADTAVYYCARHEGTDIVVVPAALDYWGQG

SEQ ID NO: 9112 - DNA, 129 bp, Artificial Sequence
  Description of Artificial Sequence: Synthetic antibody
tccaagaaccagttctccctgaagctgagctctgtgaccgccgcagacacggctgtgtattactgtgcgagacatgaggggaccgatattgtagtagtaccagctgcccttgactactggggccaggga

SEQ ID NO: 9113 - protein, 43 aa, Artificial Sequence
  Description of Artificial Sequence: Synthetic antibody
SKNQFSLKLSSVTAADTAVYYCARHEGTDIVVVPAALDYWGQG

SEQ ID NO: 9114 - protein, 16 aa, Artificial Sequence
  Description of Artificial Sequence: Synthetic antibody
CARSLNSYSFEQFDHW

SEQ ID NO: 9115 - DNA, 129 bp, Artificial Sequence
  Description of Artificial Sequence: Synthetic antibody
tgggacacatccgcgagcacagcctacatggaattgagaagcctcggatctgaagacacggctgtgtatttctgtgctcgatctctgaatagttatagttttgaacagttcgaccactggggccaggga

SEQ ID NO: 9116 - protein, 43 aa, Artificial Sequence
  Description of Artificial Sequence: Synthetic antibody
WDTSASTAYMELRSLGSEDTAVYFCARSLNSYSFEQFDHWGQG

SEQ ID NO: 9117 - DNA, 129 bp, Artificial Sequence
  Description of Artificial Sequence: Synthetic antibody
agggacacatccgcgagcacagcctacatggaattgagaagcctcggatctgaagacacggctgtgtatttctgtgctcgatctctgaatagttatagttttgaacagttcgaccactggggccaggga

SEQ ID NO: 9118 - protein, 43 aa, Artificial Sequence
  Description of Artificial Sequence: Synthetic antibody
RDTSASTAYMELRSLGSEDTAVYFCARSLNSYSFEQFDHWGQG

SEQ ID NO: 9119 - protein, 17 aa, Artificial Sequence
  Description of Artificial Sequence: Synthetic antibody
CAKDRGGGSYYGTFDYW

SEQ ID NO: 9120 - DNA, 129 bp, Artificial Sequence
  Description of Artificial Sequence: Synthetic antibody
gataattccaagaacacgctgtatctgcaaatgaacagcctgagagccgaggacacggccgtatattactgtgcgaaagatcgcgggggtgggagctactacgggacctttgactactggggccaggga

SEQ ID NO: 9121 - protein, 43 aa, Artificial Sequence
  Description of Artificial Sequence: Synthetic antibody
DNSKNTLYLQMNSLRAEDTAVYYCAKDRGGGSYYGTFDYWGQG

SEQ ID NO: 9122 - DNA, 129 bp, Artificial Sequence
  Description of Artificial Sequence: Synthetic antibody
gataattccaacaacacgctgtatctgcaaatgaacagcctgagagccgaggacacggccgtatattactgtgcgaaagatcgcgggggtgggagctactacgggacctttgactactggggccaggga

SEQ ID NO: 9123 - protein, 43 aa, Artificial Sequence
  Description of Artificial Sequence: Synthetic antibody
DNSNNTLYLQMNSLRAEDTAVYYCAKDRGGGSYYGTFDYWGQG

SEQ ID NO: 9124 - protein, 15 aa, Artificial Sequence
  Description of Artificial Sequence: Synthetic antibody
CARGNWGFGGYFDYW

SEQ ID NO: 9125 - DNA, 129 bp, Artificial Sequence
  Description of Artificial Sequence: Synthetic antibody
tcagtagacacgtctaagaaccagttctccctgaagctgagctctgtgactgccgcggacacggccgtgtattactgtgcgagaggaaactggggattcggggggtactttgactactggggccaggga

SEQ ID NO: 9126 - protein, 43 aa, Artificial Sequence
  Description of Artificial Sequence: Synthetic antibody
SVDTSKNQFSLKLSSVTAADTAVYYCARGNWGFGGYFDYWGQG

SEQ ID NO: 9127 - DNA, 129 bp, Artificial Sequence
  Description of Artificial Sequence: Synthetic antibody
tcagtagacacgtcaaacaaccagttctccctgaagctgagctctgtgactgccgcggacacggccgtgtattactgtgcgagaggaaactggggattcggggggtactttgactactggggccaggga

SEQ ID NO: 9128 - protein, 43 aa, Artificial Sequence
  Description of Artificial Sequence: Synthetic antibody
SVDTSNNQFSLKLSSVTAADTAVYYCARGNWGFGGYFDYWGQG

SEQ ID NO: 9129 - protein, 16 aa, Artificial Sequence
  Description of Artificial Sequence: Synthetic antibody
CAKVDSSGYYYYFDYW

SEQ ID NO: 9130 - DNA, 129 bp, Artificial Sequence
  Description of Artificial Sequence: Synthetic antibody
ttagataattccaagaacacgctgtatctgcaaatgaacagcctgagagccgaggacacggccgtatattactgtgcgaaagtggatagtagtggttattactactactttgactactggggccaggga

SEQ ID NO: 9131 - protein, 43 aa, Artificial Sequence
  Description of Artificial Sequence: Synthetic antibody
LDNSKNTLYLQMNSLRAEDTAVYYCAKVDSSGYYYYFDYWGQG

SEQ ID NO: 9132 - DNA, 129 bp, Artificial Sequence
  Description of Artificial Sequence: Synthetic antibody
agagataattccaagaacacgctgtatctgcaaatgaacagcctgagagccgaggacacggccgtatattactgtgcgaaagtggatagtagtggttattactactactttgactactggggccaggga

SEQ ID NO: 9133 - protein, 43 aa, Artificial Sequence
  Description of Artificial Sequence: Synthetic antibody
RDNSKNTLYLQMNSLRAEDTAVYYCAKVDSSGYYYYFDYWGQG

SEQ ID NO: 9134 - protein, 15 aa, Artificial Sequence
  Description of Artificial Sequence: Synthetic antibody
CARGGNPEHDAFDIW

SEQ ID NO: 9135 - DNA, 129 bp, Artificial Sequence
  Description of Artificial Sequence: Synthetic antibody
tccgttgacaggtccaagaaccagttctccctgaagctgagctctgtgaccgccgcggacacggccgtgtattactgtgccagaggggggaaccccgagcatgatgcttttgatatctggggccaaggg

SEQ ID NO: 9136 - protein, 43 aa, Artificial Sequence
  Description of Artificial Sequence: Synthetic antibody
SVDRSKNQFSLKLSSVTAADTAVYYCARGGNPEHDAFDIWGQG

SEQ ID NO: 9137 - DNA, 129 bp, Artificial Sequence
  Description of Artificial Sequence: Synthetic antibody
tcagtagacaggtccaagaaccagttctccctgaagctgagctctgtgaccgccgcggacacggccgtgtattactgtgccagaggggggaaccccgagcatgatgcttttgatatctggggccaaggg

SEQ ID NO: 9138 - protein, 14 aa, Artificial Sequence
  Description of Artificial Sequence: Synthetic antibody
CVKEKTGTAYFDYW

SEQ ID NO: 9139 - DNA, 129 bp, Artificial Sequence
  Description of Artificial Sequence: Synthetic antibody
atctccagagacaacgccaagaactccctgtatctgcaaatgaacagtctgagagtggaggacacggccttgtattactgtgtaaaagaaaagactgggaccgcctattttgactactggggccaggga

SEQ ID NO: 9140 - protein, 43 aa, Artificial Sequence
  Description of Artificial Sequence: Synthetic antibody
ISRDNAKNSLYLQMNSLRVEDTALYYCVKEKTGTAYFDYWGQG

SEQ ID NO: 9141 - DNA, 129 bp, Artificial Sequence
  Description of Artificial Sequence: Synthetic antibody
atctccagagacaacgccaagaaccccctgtatctacaaatgaacagtctgagagtggaggacacggccttgtattactgtgtaaaagaaaagactgggaccgcctattttgactactggggccaggga

SEQ ID NO: 9142 - protein, 43 aa, Artificial Sequence
  Description of Artificial Sequence: Synthetic antibody
ISRDNAKNPLYLQMNSLRVEDTALYYCVKEKTGTAYFDYWGQG

SEQ ID NO: 9143 - protein, 13 aa, Artificial Sequence
  Description of Artificial Sequence: Synthetic antibody
CAKSPDTAMIDYW

SEQ ID NO: 9144 - DNA, 129 bp, Artificial Sequence
  Description of Artificial Sequence: Synthetic antibody
caccatctccagagacaacagcaaaactccctgtatctgcaaatgaacagtctgagagctgaggacaccgccttgtattactgtgcaaaatccccggatacagctatgattgactactggggccaggga

SEQ ID NO: 9145 - protein, 43 aa, Artificial Sequence
  Description of Artificial Sequence: Synthetic antibody
HHLQRQQQNSLYLQMNSLRAEDTALYYCAKSPDTAMIDYWGQG

SEQ ID NO: 9146 - DNA, 129 bp, Artificial Sequence
  Description of Artificial Sequence: Synthetic antibody
accatctccagagacaacagcaaaaactccctgtatctgcaaatgaacagtctgagagctgaggacaccgccttgtattactgtgcaaaatccccggatacagctatgattgactactggggccaggga

SEQ ID NO: 9147 - protein, 43 aa, Artificial Sequence
  Description of Artificial Sequence: Synthetic antibody
TISRDNSKNSLYLQMNSLRAEDTALYYCAKSPDTAMIDYWGQG

SEQ ID NO: 9148 - protein, 12 aa, Artificial Sequence
  Description of Artificial Sequence: Synthetic antibody
CARHPWQQLSYW

SEQ ID NO: 9149 - DNA, 129 bp, Artificial Sequence
  Description of Artificial Sequence: Synthetic antibody
gtcaccatatccgtagacacgtccaagaatcagttctccctgaagctgagctctgtgaccgccgcagacacggctgtgtattactgtgcgagacatccctggcagcagctgtcctactggggccaggga

SEQ ID NO: 9150 - protein, 43 aa, Artificial Sequence
  Description of Artificial Sequence: Synthetic antibody
VTISVDTSKNQFSLKLSSVTAADTAVYYCARHPWQQLSYWGQG

SEQ ID NO: 9151 - DNA, 129 bp, Artificial Sequence
  Description of Artificial Sequence: Synthetic antibody
gtcaccatatccgtagacacgtccaagaatcagttctccctgaagctgagctctgtgaccgccgcagacacggctgtgtattactgcgcgagacatccctggcagcagctgtcctactggggccaggga

SEQ ID NO: 9152 - DNA, 354 bp, Artificial sequence
  Synthetic antibody
caggtgcagctggtgcaatctgggtctgagttgcagaagcctggggcctcagtgaaggtttcctgtaaggcttctggaaacaccttccctacttatgatatgaattgggtgcgacaggcccctggacaagggcttgagtggatgggatggatcaacaccaacactgggagcccaacgtatgcccagggcttaccaggacggtttgtcttctccttggacacatctgtcagcacggcatatctggagatcagcagcctaaaggctgaggacactgccgtgtattactgtgcgagagaggggtatcactacggtatggacgtctggggccaagggaccacggtcaccgtctcctca

SEQ ID NO: 9153 - DNA, 322 bp, Artificial sequence
  Synthetic antibody
gacatccagatgacccagtctccatcctcactgtctgcctctgtaggagacagagtcaccatcacttgtcgggcgagtcaggacattaacaattatttagcctggtttcagcagaaaccaggtaaagcccctaagtccctgatctattctgcgtccagtttgcaaagtggggtcccatcgaggttcagcggcagtggatctgggacagatttcactctcaccatcagcagcctgcagcctgaagattttgcaacttattattgccaacagtatcgtagttaccctcggacttttggccaggggaccaagctggagatcaaac

SEQ ID NO: 9154 - DNA, 358 bp, Artificial sequence
  Synthetic antibody
caggcacacctggtgcagtctggggctgaggtgaagaagcctgggtcctcggtgaaggtctcctgcaaggcttctggaggcaccttcaacagtcatgccatcggctgggtgcgacaggcccctggacaaggccttgagtggatgggaaggatcgtccctatccggaagaccacaacttacgcaccgcagttacagggcagactcacgctgaccgcggacacatccacgagcacactgtacatggaactgagtagcctgcgatccgaggactcggcccggtattactgtgcgagagtcattctgtctgggaggggctttgacatctggggccagggatccctggtcgccgtctcctcag

SEQ ID NO: 9155 - DNA, 325 bp, Artificial sequence
  Synthetic antibody
tcctatgagctgacacagccaccctcagtgtcagtgtccccaggacagacggccaggatcatctgctctggagatgcattgccaaagcaaaatgcttattggtaccagaagaagccaggccaggcccctgtgttggtgatatttaaagacagtgagaggccctcaggcatccctcagcgattctctggctccagctcggggacaacagtcacgttgaccatcagtggagtccaggcagaagacgaggctgactattactgtcaatcagcagacagcagtggtacttatgtggtattcggcggagggaccaagctgaccgtcctag

SEQ ID NO: 9156 - DNA, 361 bp, Artificial sequence
  Synthetic antibody
gaggtgcagttggtggagtctgggggaggcttggtccagcctggggggtccctgagactctcctgtgcagcctctggattcatctttagtaacttttggatgaactgggtccgccaggctccagggaaggggctggagtgggtggccaacatacagcaagatggaagtgagaaatactatgtggactctgtgaagggccgattcaccatctccacagacctcgccaagaactcactgtatctgcaaatgaacagcctgagagccgaagacacggctgtgtattactgtgcgagacaacacggtgactacgactggtactttgactactggggccagggaaccctggtcaccgtctcctcag

SEQ ID NO: 9157 - DNA, 325 bp, Artificial sequence; identical to SEQ ID NO: 9155
  Synthetic antibody

SEQ ID NO: 9158 - DNA, 361 bp, Artificial sequence; identical to SEQ ID NO: 9156
  Synthetic antibody

SEQ ID NO: 9159 - DNA, 322 bp, Artificial sequence; identical to SEQ ID NO: 9153
  Synthetic antibody

SEQ ID NO: 9160 - DNA, 373 bp, Artificial sequence
  Synthetic antibody
gaggtgcagctgttggagtctgggggaggcttggtacagcctggggggtccctgagactctcctgtgcagcctctggattcacctttagcagctatgccgtgtactgggtccgccaggctccagggaaggggctggagtgcgtctcatttattagtggtggtggtgaaaccacagactacgcagactccgtgaagggccggttcaccatctccagagacaattccaagaacacgttgtatctgcaaatgaacggcctgagagccgaggacacggccgtatattactgtgcgaaatccccggacgcaacatttctgtggttcggggagcccttcggctactggggccagggaaccctggtcaccgtctcctcag

SEQ ID NO: 9161 - DNA, 325 bp, Artificial sequence
  Synthetic antibody
gaaattgtgttgacgcagtctccaggcaccctgtctttgtctccaggggaaagagccaccctctcctgcagggccagtgagagtgtcagtagtaactacttagcctggtaccagcagaagcctggccaggctcccaggctcctcatctacgatgcatccagcagggccactggcatcccagacaggttcagtggcagtgggtctgggacagacttcactctcaccatcagcaaactggagcctgaagattttgcagtatattactgtcagcagtatgctcgggccccggacaccttcgcccaagggacacgactggagattaaac

SEQ ID NO: 9162 - DNA, 364 bp, Artificial sequence
  Synthetic antibody
caggtgcagctggtggagtctgggggaggcgtggtccagcctgggaggtccctgagactctcctgtgcagcctctggattcaccttcagtagctatgctatgcactgggtccgccaggctccaggcaaggggctggagtgggtggcagttatatcatatgatggaagcaataaatactacgcagactccgtgaagggccgattcaccatctccagagacaattccaagaacacgctgtatctgcaaatgaacagcctgagagctgaggacacggctgtgtattactgtgcgagagatcctaacccaatggttttggcctactttgactactggggccagggaaccctggtcaccgtctcctcag

SEQ ID NO: 9163 - DNA, 331 bp, Artificial sequence
  Synthetic antibody
cagactgtggtgacccaggagccatcgttctcagtgtcccctggagggacagtcacactcacttgtggcttgagctctggctcagtctctactagttactaccccagctggtaccagcagaccccaggccaggctccacgcacgctcatctacagcacaaacactcgctcttctggggtccctgatcgcttctctggctccatccttgggaacaaagctgccctcaccatcacgggggcccaggcagatgatgaatctgattattactgtgtgctgtatatgggtagtggcatttgggtgttcggcggagggaccaagctgaccgtcctag

SEQ ID NO: 9164 - DNA, 373 bp, Artificial sequence; identical to SEQ ID NO: 9160
  Synthetic antibody

SEQ ID NO: 9165 - DNA, 325 bp, Artificial sequence; identical to SEQ ID NO: 9155
  Synthetic antibody

SEQ ID NO: 9166 - DNA, 359 bp, Artificial sequence
  Synthetic antibody
caggtgcagctggtggagtctgggggaggcgtggtccagcctgggaggtccctgagactctcgtgtgcagcctctggttttaacctcagcaactatgctatgcactgggtccgccaggcatcaggcaaggggctggagtgggtgtcacttatatcatacgatggaagtattaaatattacacagactccgtgaagggccgattcaccgtctccggggacaattccaagaacacactgtttctgcaaatgaacagcctgcgacctgacgactcggctctttattactgtgtgaggggcggtgtcagtggcccaaattcttttgatatgtggggccaagggacaacggtcaccgtctcttc

SEQ ID NO: 9167 - DNA, 325 bp, Artificial sequence; identical to SEQ ID NO: 9155
  Synthetic antibody

SEQ ID NO: 9168 - DNA, 352 bp, Artificial sequence
  Synthetic antibody
gaggtgcagctggtggagtctgggggaggcttggtccagcctggggggtccctgacactctcctgtgcagcctctggtttgaccattagaaactattggatgaactgggtccgccaggctccagggaaggggctggagtgggtggccaacatggaagaagatggaagtgagaaaaactatgtggactctgtgaagggccgattcatcatctccagagacgacgccaagaactcactatatctacaaatgaacagcctgagagccgaggacacggctgtatattactgtacgagagatcccggtcccggggatttttcgtggggccagggaaccgtggtaaccgtctcctcag

SEQ ID NO: 9169 - DNA, 322 bp, Artificial sequence
  Synthetic antibody
gaaatagtgttgacgcagtctccagccaccctgtctgtgtctccaggggaaagggtcaccctctcctgcagggccagtcagactgtaaacaacaacttaaactggctccagcacaaaccgggccaggctcccaggctcgtcatcattggtacatctaccagggcctctggtgtcccagccaggttcagtggcagtgggtcggggacagagttcactctcaccatcagcagcctgcagtctgaggattatgcaatttattactgtcaacagtattatgagtggcctccgatcacctacggccaagggacacgactggagatta

SEQ ID NO: 9170 - DNA, 372 bp, Artificial sequence
  Synthetic antibody
caagtgcagctccagcagtcgggcccaggactggtgaggccttcggggaccctgtccctcacgtgcggtgtctctggtggctccatcagcagtcctaattggtggagttgggtccgccaggccccagggaagggactggagtggattggcgaagtctatcctactgggaacacctactacaacccgtccctcaagagtcgagtcaccatttcaatagaggagtcgaagaacgagttctccctgaacttgagctctgtgaccgccgcagacatgggcatttattactgtgcgagaggcgtcgtgggagcaagcgacttctattattacggtatggacgtctggggccaagggaccgcggtcaccgtctcctca

SEQ ID NO: 9171 - DNA, 340 bp, Artificial sequence
  Synthetic antibody
gagatcgtgatgacccagtctccagactccctgactgtgtctctgggcgagagggccaccatcagctgcaagtccagccagagtcttttatacagttccaacaatagggactacttagcttggtaccaacagaaagcaggtcagcctcctaagttgctcttttactgggcatctacccgggaatccggggtccctgaccgattcggtggcagcgggtctgggacacatttcactctcaccatctacaacctgcagcctgaagatgtggcagtttatttctgtcagcagtattttagtcctccgtatacttttggccaggggaccaagctggagatcaaac

SEQ ID NO: 9172 - DNA, 362 bp, Artificial sequence
  Synthetic antibody
caggtgcagctgcaggagtcgggcccaggactggtgaagccttcacagaccctgtccctcaactgctctgtctctggagactccatcagcagaagtgattatcactggagttggatccgccagcacccgggaaagggcctggagtggattggctatatatataataatggcgacacatattataatccgtccctcaagagtcgtgttaccatgtcagtagacacgtctaagaacgagttctccctgaagctgacctctgtgactgccgcggacacggccgtctattactgtgcgagagacggttacgctggtaactccgaggctcttgactactggggccagggaaccctggtcaccgtctc

SEQ ID NO: 9173 - DNA, 328 bp, Artificial sequence
  Synthetic antibody
gaaattgtgttgacacagtctccagcctccctgtctttgtctccaggggaaagagccaccctctcctgcagggccagtcagagtgttaccaactacttagcctggtaccaacagagacctggccaggctcccaggctcctcatctatcaaacatccaacagggccactggcatcccagccaggttcagtggcagtgggtctgggacagacttcacactcaccatcagcagcctagagcctgaagattttgcattttattactgtcagcagcgcagccaccggcccggggggatcacgttcggccaagggacacgactggagattaaac

SEQ ID NO: 9174 - DNA, 361 bp, Artificial sequence; identical to SEQ ID NO: 9156
  Synthetic antibody

SEQ ID NO: 9175 - DNA, 322 bp, Artificial sequence
  Synthetic antibody
gacatccagatgacccagtctccatcctccctgtctgcatctgtaggagacagagtcaccatcacttgccaggcgagtcaggacattagcaactatttaaattggtatcagcagaaaccagggaaagcccctaagctcctgatctacgatgcatccaatttggaaacaggggtcccatcaaggttcagcggcagtggatctgggacagattttactttcaccatcagcagcctgcagcctgaagatattgcaacatattactgtcaacagtatgataatctccctctcactttcggccctgggaccaaagtggatatcaaac

SEQ ID NO: 9176 - DNA, 361 bp, Artificial sequence; identical to SEQ ID NO: 9156
  Synthetic antibody

SEQ ID NO: 9177 - DNA, 340 bp, Artificial sequence; identical to SEQ ID NO: 9171
  Synthetic antibody

SEQ ID NO: 9178 - DNA, 367 bp, Artificial sequence
  Synthetic antibody
gaggtgcaattagtggagtctgggggaggcctggtcaagcctggggagtccctgagactctcctgtgcggcctctaaattcaccttcagtacctatcatatgaactggattcgccaggctccaggaaaggggctagagtgggtctcagccatcagtgctgacagtacggtcacaacatatgcagactcagtgaggggccgattcatcatttctagagacaacgacaagaattcactgtatctgcaaatgaatggcctgagagtggacgacctggctgtatattactgtgcgagggggcgtgcgcgtggtagtgatcatactggatttgactcctggggccagggaaccctggtcaccgtctcctcag

SEQ ID NO: 9179 - DNA, 340 bp, Artificial sequence
  Synthetic antibody
gatattgtgatgactcagtctccactctccctgtccgtcacccctggagagccggcctccatctcctgcaggtcaagtcagagcctcctgcatcgtaatggatacaacatattggattggtacctgcagaagccagggcagtctccacaactcctgatctatttgggttctaatcgggcctccggggtccctgacaggttcagtggcagtggatcgggcacggactttacattgaaaatcagcagagtggaggctgaggatgttggggtttactactgcatgcaaggtctacagactcctccgtacacttttggccaggggaccaagctggagatcaaac

SEQ ID NO: 9180 - DNA, 361 bp, Artificial sequence; identical to SEQ ID NO: 9156
  Synthetic antibody

SEQ ID NO: 9181 - DNA, 322 bp, Artificial sequence
  Synthetic antibody
gacatccagatgacccagtctccatcctccctgtctgcatctgtaggagacagagtcaccatcacttgccgggcaagtcagagcattaccacctatttaaattggtatcagcagaaagcagggaaagcccctaacctcctgatctatgctccatccaatttgcaaagtggggtcccatcaagattcagtggcagtggatctgggacagatttcactctcaccatcagcagtctgcaacctgaagattttggaacttactactgtcagcagagttacagtagtccgttcactttcggccctgggaccaaagtggatatcaaac

SEQ ID NO: 9182 - DNA, 361 bp, Artificial sequence; identical to SEQ ID NO: 9156
  Synthetic antibody

SEQ ID NO: 9183 - DNA, 322 bp, Artificial sequence; identical to SEQ ID NO: 9169
  Synthetic antibody

SEQ ID NO: 9184 - DNA, 372 bp, Artificial sequence; identical to SEQ ID NO: 9170
  Synthetic antibody

SEQ ID NO: 9185 - DNA, 325 bp, Artificial sequence; identical to SEQ ID NO: 9155
  Synthetic antibody

SEQ ID NO: 9186 - DNA, 337 bp, Artificial sequence
  Synthetic antibody
caggtgcagctgcaggagtcgggcccaggactggtgaagccttcggagaccctgtccctcacctgcactgtctctggtggctccatcagtagttactactggagctggatccggcagcccccagggaagggactggagtacattggctatatctattacagtgggagcaccaactacaacccctccctcaagagtcgagtcaccatatcagtagacacgtccaagaaccagttatccctgaagctgaggtctgtgaccgctgcggacacggccgtgtattactgtgcgagggggtttgactattggggccagggaaccctggtcaccgtctcctcag

SEQ ID NO: 9187 - DNA, 325 bp, Artificial sequence
  Synthetic antibody
gaaattgtgttgacgcagtctccaggcaccctgtctttgtctccaggggaaagagccaccctctcctgcagggccagtcagagtgttagcagcagctacttagcctggtaccagcagaaacctggccaggctcccaggctcctcatctatggtacatccagcagggccactggcatcccagacaggttcagtggcagtgggtctgggacagacttcactctcaccatcagcagactggagcctgaagattttgcagtgttttactgtcagcagtatggtaactctccgtggacgttcggccaagggaccaaggtggaaatcaaac

SEQ ID NO: 9188 - DNA, 352 bp, Artificial sequence; identical to SEQ ID NO: 9168
  Synthetic antibody

SEQ ID NO: 9189 - DNA, 325 bp, Artificial sequence
  Synthetic antibody
gaaattgtgttgacacagtctccagccaccctgtctttgtctccaggggaaagagccaccctctcctgcagggccagtcagagtgttagcagctacttagcctggtaccaacagaaacctggccaggctcccaggctcctcatttttgatgcatccaacagggccactggcatcccagccaggttcagtggcagtgggtctgggacagacttcactctcaccatcagcagcctagagcctgaagattttgcagtttatttctgtcagcagcgtagcagctggcaggggatcactttcggcggagggaccaaggtggagatcaaac

SEQ ID NO: 9190 - DNA, 361 bp, Artificial sequence; identical to SEQ ID NO: 9156
  Synthetic antibody

SEQ ID NO: 9191 - DNA, 325 bp, Artificial sequence; identical to SEQ ID NO: 9189
  Synthetic antibody

SEQ ID NO: 9192 - DNA, 372 bp, Artificial sequence; identical to SEQ ID NO: 9170
  Synthetic antibody

SEQ ID NO: 9193 - DNA, 319 bp, Artificial sequence
  Synthetic antibody
gaaattgtgttgacacagtctccagccaccccgtctttgtctccaggggaaagagccaccctctcctgcagggccagtcagagtgttagcagctacttagcctggtaccaacagaaacctggccaggctcccaggctcctcatttttgatgcatccaacagggccactggcatcccagccaggttcagtggcagtgggtctgggacagacttcactctcaccatcagcagcctggagtctgaagattttggaacttattactgtcagcagtataatcactggcggacgttcggccaagggaccaaggtggaaatcaaac

SEQ ID NO: 9194 - DNA, 352 bp, Artificial sequence; identical to SEQ ID NO: 9168
  Synthetic antibody

SEQ ID NO: 9195 - DNA, 340 bp, Artificial sequence; identical to SEQ ID NO: 9171
  Synthetic antibody

SEQ ID NO: 9196 - DNA, 361 bp, Artificial sequence; identical to SEQ ID NO: 9156
  Synthetic antibody

SEQ ID NO: 9197 - DNA, 325 bp, Artificial sequence; identical to SEQ ID NO: 9161
  Synthetic antibody

SEQ ID NO: 9198 - DNA, 381 bp, Artificial sequence
  Synthetic antibody
caaatgcagctggtgcagtctggggctgaggtgaagaagcctgggtcctcggtgaaggtctcctgcaaggcttctggaggcaccttcatcaattatgctatcaactgggtgcgacaggcccctggacaacgacttgagtacatgggagggatcatccctcttcttggtgttgcaaactacacacagcgattccagggcagagtcacgatgaccgcggacagatctacgagcacagcctacatggagctgagtaatctggcaattgaagacacggccgtgtattactgtgcgagagagtatagcagcagccggcccttattttacacctacaactacggtatggacgtctggggccaagggaccacggtcaccgtctcctca

SEQ ID NO: 9199 - DNA, 337 bp, Artificial sequence
  Synthetic antibody
gatattgtgatgacccagactccactctctctgtccgtcacccctggacagccggcctccatctcctgcaagtctagtcagggcctcctgcatggtgatgggaagacctatttgtattggttcttgcagaaggcaggccagcctccacaactcctgatctatgaagtttcaaaccgcttctccggagtgccagatagattcagcggcagcgggtcagggacagatttcacactgaaaatcagccgggtggaggctgaggatgttgggatttattattgcatgcaaagtgtacaccttccgtacacttttggccaggggaccaagttggagatcaaac

SEQ ID NO: 9200 - DNA, 352 bp, Artificial sequence; identical to SEQ ID NO: 9168
  Synthetic antibody

SEQ ID NO: 9201 - DNA, 319 bp, Artificial sequence
  Synthetic antibody
tcctatgagctgactcagccaccctcagtgtccgtgtccccaggacagacagccagcatcacctgctctggagataaattgggggagaaatatgcttgctggtatcagcagaagccaggccagtcccctgtgttggtcatttatcaagataccaagcggccctcagggatccctgagcgattctctggctccaactctgggaacacagccacgctgaccatcagcgggacccaggctgtggatgaggctgactattactgtcaggcgtgggactacaccaccgtgatattcggcggagggaccaagctgaccgtcctag

SEQ ID NO: 9202 - DNA, 352 bp, Artificial sequence; identical to SEQ ID NO: 9168
  Synthetic antibody

SEQ ID NO: 9203 - DNA, 322 bp, Artificial sequence
  Synthetic antibody
gaaattgtgttgacgcagtctccaggcaccctgtctttgtctccaggggaaagagccaccctctcctgcagggccagtcagagtgttagcagcagctacttagcctggtaccagcagaaacctggccaggctcccaggctcctcatctatggtgcatccagcagggccactggcatcccagacaggttcagtggcagtgggtctgggacagacttcactctcaccatcagcagactggagcctgaagattttgcagtgtattactgtcagcagtatggtagctcttacacttttggccaggggaccaagctggagatcaaac

SEQ ID NO: 9204 - DNA, 352 bp, Artificial sequence; identical to SEQ ID NO: 9168
  Synthetic antibody

SEQ ID NO: 9205 - DNA, 322 bp, Artificial sequence
  Synthetic antibody
gaaattgtgttgacacagtctccagccaccctgtctttgtctccaggggaaagagccaccctctcctgcagggccagtcagagtgttagcagctacttagcctggtaccaacagaaacctggccaggctcccaggctcctcatttttgatgcatccaacagggccactggcatcccagccaggttcagtggcagtgggtctgggacagacttcactctcaccatcagcagcctgcagcctgaagattttgcaacttattattgccaacagtatcgtagttaccctcggacttttggccaggggaccaagctggagatcaaac

SEQ ID NO: 9206 - DNA, 352 bp, Artificial sequence; identical to SEQ ID NO: 9168
  Synthetic antibody

SEQ ID NO: 9207 - DNA, 322 bp, Artificial sequence; identical to SEQ ID NO: 9181
  Synthetic antibody

SEQ ID NO: 9208 - DNA, 382 bp, Artificial sequence
  Synthetic antibody
caggtgcagctggagcagtctggggctgaggtgaagaggcctgggtcttcggtgaaggtctcctgcaagggtgatggggacacattcagcacatatgccatcacctgggtgcgacaggcccctggacaagggcttgagtggatggggaggatcatccctggccttgacctggtggataatcaacagaagtttcaggacagactgacaattaccgcggacaaatccacgaccacagcctacatggagctgagaagcctcagatctgaagacacggccgtatattattgtgcgagaggtagacgttacgattttttggatggtcaatatacgtcatggtacttcgacatttggggccgtggcaccctggtcactgtctcctcag

SEQ ID NO: 9209 - DNA, 337 bp, Artificial sequence
  Synthetic antibody
aatattgtgatgactcagtctccactctccctgcccgtcacccctggagagccggcctccatgtcctgcaggtctaatcagagcctcctgtatggtaatggatacaactatttggattggtacctgcagagaccagggcagtctccacagctcctaatctttttgggttctaatcgggcctccggggtccctgacaggttcagtggcagtggatcaggcacagattttacactgaaaatcaacagagtggaggctgaggatgtgggaatttattactgcatgcaaggtcaagagaatcctccaacttttggccctgggaccaaagtggagatcaaac

SEQ ID NO: 9210 - DNA, 373 bp, Artificial sequence; identical to SEQ ID NO: 9160
  Synthetic antibody

SEQ ID NO: 9211 - DNA, 319 bp, Artificial sequence
  Synthetic antibody
gaaatagtgatgacgcagtctccagccaccctgtctgtgtctccaggggaaagagccaccctctcctgcagggccagtcagagtgttagcagcaacttagcctggtaccagcagaaacctggccaggctcccaggctcctcatctatggtgcatccaccagggccactggtatcccagccaggttcagtggcagtgggtctgggacagacttcactctcaccatcagcagcctgcagtctgaagattttgcagtttattactgtcagcagtataataactggcggacgttcggccaagggaccaaggtggaaatcaaac

SEQ ID NO: 9212 - DNA, 354 bp, Artificial sequence
  Synthetic antibody
cagatgcaactggtgcagagcgggaccgaggtgaaaaaacccggcgagtccttgaagattagttgcaaaggttcaggttatggattcattacctactggataggatgggtaagacaaatgccaggtaaaggtttggagtggatggggataatataccctggggattctgagacaagatactcccccagcttccagggtcaggtaactatatctgcagataaaagtataaacactgcctatcttcagtggtcctcactgaaagcatctgacactgctatctactactgtgccggaggtagtggcatatcaactccaatggacgtatggggtcaagggacaactgtcaccgtctcc

SEQ ID NO: 9213 - DNA, 258 bp, Artificial sequence
  Synthetic antibody
tctgtactctacagcagcatcaataaaaattacctcgcatggtatcagcaaaagccaggacaacccccaaaacttctcatatattgggcaagtacacgggagtctggcgtccccgataggttttctggtagtgggagtggtactgactttacccttaccatatcatcacttcaagccgaggatgtcgctgtgtactactgccaacaatattattcaaccccttatacattcggccagggcacaaaggtagaaattaaa

SEQ ID NO: 9214 - DNA, 375 bp, Artificial sequence
  Synthetic antibody
caggtgcagctgcaggagtcgggcccaggactggtgaagccttcacagaccctgtccctcacctgcactgtctctggtggctccatcagcagtggtagtcactactggagctggattcggcagcccgccggaaagggactggagtgggtcgggcgtatctataccagtgggagcaccaactacaacccctccctcgagcgtcgagtcaccatatcactaggcacgtccaagaaccagttctaccttgatctgacctctgtgaccgccgcagacacggccgtgtattactgtgcgagagattccttgagtggttcttaccactactactacggtatggacgtctggggccaagggacctcggtcaccgtctcctca

SEQ ID NO: 9215 - DNA, 331 bp, Artificial sequence
  Synthetic antibody
cagtctgtgctgactcagccaccctcagcgtctgggacccccgggcagagggtcaccatctcttgttctggaagcagttccaacatcggaagtaattatgtttactggtaccagcacctcccaggaacggcccccaaactcctcatctataggaattatcagcggccctcaggggtccctgaccgattctctggctccaagtctggcacctcagcctccctggccatcagtgggctccggtccgaggatgagggtgattattattgtgcagtttgggatgacagcctgagtggttgggtgttcggcggagggaccaagctgaccgtcctag

SEQ ID NO: 9216 - DNA, 355 bp, Artificial sequence
  Synthetic antibody
caggtgcaactggtggagtctgggggaggcgtggtccagcctgggaggtccctgagactctcctgtgcagcctctggattcaccttcattagctatactatgcactgggtccgccaggctccaggcaaggggctggagtgggtggcacttatatcatatgatggatacaataagtactatgcagactccgtgaagggccgatttaccatctccagagacaattccaagaacacgctgtatgtgcaaatgaacagcctgagagctgaggacacggctctgtattactgtgcgagagaagggagcccggaggcctttgactactggggccagggaaccctggtcaccgtctcctcag

SEQ ID NO: 9217 - DNA, 322 bp, Artificial sequence; identical to SEQ ID NO: 9169
  Synthetic antibody

SEQ ID NO: 9218 - DNA, 372 bp, Artificial sequence
  Synthetic antibody
gaggtgcagctggtggagtctgggggaggcttggtccagccgggggggtcccggagactctcctgtggagcctctggattcacctttactaatcattggatgagctgggtccgccaggctccagggaaggggctggagtgggtggccagcataaagcaagatggagctgagaaatactatgtggactatctgaagggccgattcaccatctccagagacaacgccaagaattcactgtatctgcaaatgaacagcctgagagtcgaggacacggctgtttattactgtgcgagacgtatcacgatggcactggctggttggggttggggtatggacgtctggggccaagggaccacggtcagagtctcctca

SEQ ID NO: 9219 - DNA, 337 bp, Artificial sequence
  Synthetic antibody
gatattgtgatgactcagtctccactctccctgcccgtcacccctggagagccggcctccatctcctgcaggtctagtcggagtctcttgtctaggaatggatacaactatttggattggtacctgcagaggccagggcagtctccacagctcgtgatctatttgggttctaatcgggcctccggggtccctgacaggttcagtggcagtggatcaggcacagattttacactgaaaatcagcagagtggaggctgaggatgttgggctttattactgcatgcaagctatgcaagctcctctcactttcggcccggggaccaaagtggaaatcaaac

SEQ ID NO: 9220 - DNA, 378 bp, Artificial sequence
  Synthetic antibody
caggtgcagctggtacaatctgggtctgaattgaagaagcctggggcctcagtgaaggtttcctgcaagacttctggatacaccttcactagttatgctataaattgggtgcgacaggcccctggacaagggcttgagtggatcggatggatcaacatcaacactgggaacccaacgtatgcccagggcttcacaggacgggttgacttctccttggacacctctgtcagcacggcatatctgcagatcagaagcctaaaggctgaggacactgctgtgtattactgtgcgagagatcggggtatagcagctcgtcggggatactactactacggtatggacgtctggggccaagggaccacggtcaccgtctcctca

SEQ ID NO: 9221 - DNA, 325 bp, Artificial sequence; identical to SEQ ID NO: 9155
  Synthetic antibody

SEQ ID NO: 9222 - DNA, 382 bp, Artificial sequence; identical to SEQ ID NO: 9208
  Synthetic antibody

SEQ ID NO: 9223 - DNA, 325 bp, Artificial sequence; identical to SEQ ID NO: 9155
  Synthetic antibody

SEQ ID NO: 9224 - DNA, 337 bp, Artificial sequence; identical to SEQ ID NO: 9186
  Synthetic antibody

SEQ ID NO: 9225 - DNA, 325 bp, Artificial sequence; identical to SEQ ID NO: 9155
  Synthetic antibody

SEQ ID NO: 9226 - DNA, 364 bp, Artificial sequence
  Synthetic antibody
caggtgcagcttcagcagtggggcgcaggacttttgaagccttcggaaaccctgtccctcacctgcgctgtccacggtgggtccttcagtggtccctactggacctggatccgccagtcgccaagtcaggggctggagtggattggagaaatcggtcctcgtgggatcacctactacagcccgtccctcgagagtcgagtcaccatatcagcagacacgtccaggaatcagttctccctgaggctgacgtctgtgaccgccgcggacacggctgtctattactgtgcgagaggcttggttattggaagaagcagcctaaactttgactcttggggccagggaaccctggtcaccgtctcctcag

SEQ ID NO: 9227 - DNA, 325 bp, Artificial sequence; identical to SEQ ID NO: 9161
  Synthetic antibody

SEQ ID NO: 9228 - DNA, 358 bp, Artificial sequence
  Synthetic antibody
gaggtgcaactggtggaggctgggggaggcctggtcaagcctggggggtccctgagactctcctgtgcagcctctggattcaccttcagtggctatgccataaactgggtccgccaggctccagggaagggcctggagtgggtctcgtccattagtgggaataataatgatatgtactacgcagactcagtgaagggccgattcaccatctccagagacaacgccaagagctcagtgtttctgcaaatgaacagcctgagagtcgaggacacggctatctattactgtgcgagagataacttagcactggctggggaggactactggggccagggaaccctggtcaccgtctcctcag

SEQ ID NO: 9229 - DNA, 340 bp, Artificial sequence; identical to SEQ ID NO: 9171
  Synthetic antibody

SEQ ID NO: 9230 - DNA, 373 bp, Artificial sequence; identical to SEQ ID NO: 9160
  Synthetic antibody

SEQ ID NO: 9231 - DNA, 322 bp, Artificial sequence
  Synthetic antibody
gaaatagtgatgacgcagtctccagccaccctgtctgtgtctccaggggaaagagtcaccctctcctgcagggccagtcagagtgttagcagcaacgtagcctggtaccagcagaaacctggccaggctcccagcctcctcatctatggtgcatccaccagggccactggtaccccagccaggttcagtggcagtgggtctgggacagggttcactctcaccatcaccagcctgcagtctgaagattttggagtttattactgtcagcaatataataactggcgattcactttcggccctgggaccaaagtggagatcaaac

SEQ ID NO: 9232 - DNA, 375 bp, Artificial sequence
  Synthetic antibody
gaggtgcagttgttggagtcggggggaggcttggtgcagcctggggggtccctgagactctcctgtgcagcctctggattcgtctttagcgactattccatgaattgggtccgcctggctccaggaaaggggctggcgtgggtctctgttgttggtgttgatgccgtcaccaaattctatgaagactccgtgaagggccggttcaccatttccagagacaactccaagaacacgatatatctgcaaatgaacaacctgagagccgaagacacggccgtatatcactgtgcgaaaagtcagccggtgtctcgcatgggtcgcttcttcgtcggtttggacgtctggggccaagggaccacggtcaccgtctcctca

SEQ ID NO: 9233 - DNA, 340 bp, Artificial sequence; identical to SEQ ID NO: 9171
  Synthetic antibody

SEQ ID NO: 9234 - DNA, 367 bp, Artificial sequence
  Synthetic antibody
gaggtgcagctggtggagtctgggggaggcctggtcaagcctggggggtccctgagactctcctgtgcagcctctggattcaccttcagtagttatagcatgaactgggtccgccaggctccagggaaggggctggagtgggtctcatccattagtagtactagtagttacatatactacgcagactcagtgaagggccgattcaccatctccagagacaacgccaagaactcactgtatctgcaaatgaacagcctgagagccgaggacacggctgtatattactgtgcgagacgtagggcggcaactggtacggagttctactttgactactggggccagggaaccctggtcaccgtctcctcag

SEQ ID NO: 9235 - DNA, 331 bp, Artificial sequence
  Synthetic antibody
cagtctgtgttgacgcagccgccctcagtgtctgcggccccaggacagaaggtcaccatctcctgctctggaagcagctccaacattgggaataattatgtatcctggtaccagcagctcccaggaacagcccccaaactcctcatttatgacaataataagcgaccctcagggattcctgaccgattctctggctccaagtctggcacgtcagccaccctgggcatcaccggactccagactggggacgaggccgattattactgcggaacatgggatagcagcctgagtgctgtgctattcggcggagggaccaagctgaccgtcctag

SEQ ID NO: 9236 - DNA, 358 bp, Artificial sequence; identical to SEQ ID NO: 9154
  Synthetic antibody

SEQ ID NO: 9237 - DNA, 313 bp, Artificial sequence
  Synthetic antibody
gacatccaaatgacccaatctccttccgccctggctgcatctctgggagacagagtcatcatcacttgccaggcgagtcacgacattggtcacaatttaaattggtatcagcagagaccaggggaagcccctcagctcctgatctacgatgtatccaatttgcaaacaggggtcccatcaaggttcagtggctttggatttgggacaaattttactttcaccatcagcggcctgcagtctgaagatatcggaacatattactgtcaacagtatgatagtatttttggcccagggaccaagttggagatcaaac

SEQ ID NO: 9238 - DNA, 381 bp, Artificial sequence
  Synthetic antibody
caggtccagctggtgcagtctggggctgaggtgaagaagcctgggtcctcggtgaaggtctcctgcaaggcttctggaggcacctttagcagctatgctttcagttgggtgcgacaggcccctggacaagggcttgagtggatgggaaggatcatccttattcttggtataacagactacgcaccgaagttccagggcagagtcacgattaccgcggacaaatccacgagcacagtgtacatggaggtgagcagcctgagatcggacgacacggccgtgtattactgtgcgagagaaaggccaagagacccctccagtaactacgttgcctactacgctatggacgtctggggccaagggacctcggtcaccgtctcgtca

SEQ ID NO: 9239 - DNA, 322 bp, Artificial sequence; identical to SEQ ID NO: 9181
  Synthetic antibody

SEQ ID NO: 9240 - DNA, 372 bp, Artificial sequence; identical to SEQ ID NO: 9170
  Synthetic antibody

SEQ ID NO: 9241 - DNA, 321 bp, Artificial sequence
  Synthetic antibody
gacatccagatgacccagtctccatcctccctgtctgcatctgttggggacagagtcaccatcacttgccgggcaagtgaaaccattagtaattttttaaattggtatctccaacgaccagggaaagcccctcaggtcctcatctattctgcagcccgtttacaaagtggggtcccatcaaggttccgtgccagtggatctgggacagatttcactctcaccatcaccagtctgcaacttgaagattttggagtttattactgtcaacagagtttcaatacccctcggacgttcggccaagggaccagggtggagatcaaa

SEQ ID NO: 9242 - DNA, 352 bp, Artificial sequence; identical to SEQ ID NO: 9168
  Synthetic antibody

SEQ ID NO: 9243 - DNA, 325 bp, Artificial sequence; identical to SEQ ID NO: 9161
  Synthetic antibody

SEQ ID NO: 9244 - DNA, 376 bp, Artificial sequence
  Synthetic antibody
caggtgcagctacagcagtggggcgcaggactcttgaagcctgcggagaccctgtccctcacctgcgctgtccatggtgggtccttcactgattcctactggagttggatccgccagacccccgggcagggactggagtggcttggggaagtcaatcatagtggaagcaccaactacagcccgtccctcaagactcgagtcgccatatcaatagacacgtccaagaaccaggtctccctcaggctgacctctgtgagcgccgcggacacggctgtctattattgtgcgagaggaatggccgttcgggggagacagctctacttactcgggggctatgacctctggggccagggaaccctggtcaccgtctcctcag

SEQ ID NO: 9245 - DNA, 319 bp, Artificial sequence
  Synthetic antibody
gaagttgtgatgacgcagtctccagccaccctgtctgtgtctccaggggaaagagccaccctctcctgcagggccagtcagagtgtctacatcaacttagcctggtaccagcagaaacctggccagcctcccaggctcctcatctatggtgcatccaccagggccactggtatcccagccaggttcagtggcagtgggtctgggacagagttcactctcaccatcagcagcctggagtctgaagattttggaacttattactgtcagcagtataatcactggcggacgttcggccaagggaccaaggtggaaatcaaac

SEQ ID NO: 9246 - DNA, 355 bp, Artificial sequence
  Synthetic antibody
tcccagctgctgcaggagtcgggcccaggactcgtgaagccttcggagaccctgtccctcacgtgcactgtatttggtgactccatctatggttactactggacttggatccggcagcccccagggaggggactggagtggattgggtctgtctatcacagtggcagcaccaactacaacccctccctcatgagtcgagtcaccatatcagtggacacgtccgagaagcagttctccctgaaggtgacttctgtgaccggtgcggacacggccgtatatttttgtgcgagagggctggctggcgggggttattttgacgcctggggccagggaaacctggtcgccgtctcctcag

SEQ ID NO: 9247 - DNA, 322 bp, Artificial sequence
  Synthetic antibody
gacgtccagatgacccagtctccatcctccctgtctgcatctgtaggagacagagtcaccatcacttgccgggcgagtccgggcattaacacttatttagcctggtatcagcagaagccagggcaagttcctgacctcctgatctatggtgcatccaccttgcgatctggggtcccgtctcggttcagtggcagtggatctgggacagatttcactctcaccatcagcagcctgcagcttgaagatgttgcaacttattactgtcaggcttattacgttggcctcggtactttcggccaagggaccaaggtggaaatcaaac

SEQ ID NO: 9248 - DNA, 358 bp, Artificial sequence
  Synthetic antibody
gaggtgcaactggtggagtctgggggaggagtggtacggcctggggagtccctgagactctcctgtgtaggctctggattcccctttggtggctatggcatgagttgggtccgccaagttccagggaaggggctggagtgggtctctggaattaattggagtgctgatcgaagagtttatgcagactttgtgaagggccgattcaccatctccagagactaccccaagaagtctgtgtccttgcaaatggacaatctcagagccgaggacacggccctctattattgtgcgagagagcggacctctcgccgtgactttgacttctggggccagggaaccctggtcaccgtctcctcag

SEQ ID NO: 9249 - DNA, 324 bp, Artificial sequence
  Synthetic antibody
tcctttgtgctgactcagccaccctcagtgtcagtggctccaggacagacggccaggattccctgtgcgaaaaattatcgtggaagtcagactgtgcactggtaccagcggaagccaggccaggcccctgtcttggtcatcaattctgatgacgaccggccctcagggatctctgagcgattctctggctccaactctgggaacacggccaccctgaccatcagcagggtcgaagccggggatgaggccgactattattgtcaggtgtgggatcccagttctgatcaagcgctattcgccggagggaccacgctgaccgtccta

SEQ ID NO: 9250 - DNA, 364 bp, Artificial sequence
  Synthetic antibody
gaggtgcagctggtggactctgggggaggcttggtccagcctggggggtccctgagactctcctgtgcagcctctggattcacctttactagttattggatgaactgggtccgccaggctccagggaaggggctggagtgggtggccaacataaagcaagatggaagtgagaaagactatgtggactctgtgaagggacgattcaccatctccagagacaacgccaagaactcactgtatctgcaaatgagcagcctgagagccgaggacacggctgtgtattactgtgcgagagatctcggcagtggctcgtaccacctctttgactactggggccagggaaccctggtcaccgtctcctcag

SEQ ID NO: 9251 - DNA, 325 bp, Artificial sequence; identical to SEQ ID NO: 9155
  Synthetic antibody

SEQ ID NO: 9252 - DNA, 378 bp, Artificial sequence; identical to SEQ ID NO: 9220
  Synthetic antibody

SEQ ID NO: 9253 - DNA, 322 bp, Artificial sequence; identical to SEQ ID NO: 9181
  Synthetic antibody

SEQ ID NO: 9254 - DNA, 358 bp, Artificial sequence; identical to SEQ ID NO: 9248
  Synthetic antibody

SEQ ID NO: 9255 - DNA, 325 bp, Artificial sequence; identical to SEQ ID NO: 9155
  Synthetic antibody

SEQ ID NO: 9256 - DNA, 364 bp, Artificial sequence; identical to SEQ ID NO: 9250
  Synthetic antibody

SEQ ID NO: 9257 - DNA, 330 bp, Artificial sequence
  Synthetic antibody
cagtctgtgttgacgcagccgccctcagtgtctgcggccccaggacagaaggtcaccatctcctgctctggaagcagctccaacattgggaataattatgtatcctggtaccagcagctcccaggaacagcccccaaactcctcatttatgacaataataagcgaccctcagggattcctgaccgattctctggctccaagtctggcacgtcagccaccctgggcatcaccggactccagactggggacgaggccgattattactgcggaacatgggataacagcctgagtgcctgggtgttcggcggagggaccaagctgaccgtccta

SEQ ID NO: 9258 - DNA, 337 bp, Artificial sequence; identical to SEQ ID NO: 9186
  Synthetic antibody

SEQ ID NO: 9259 - DNA, 325 bp, Artificial sequence; identical to SEQ ID NO: 9189
  Synthetic antibody

SEQ ID NO: 9260 - DNA, 373 bp, Artificial sequence
  Synthetic antibody
caggtgcagctggtgcaatctgggtctgagttgaagaagcctggggcctcagttaagatttcctgcaagacttctggatacaatttcactaatcatcctataaattgggtgcgacaggcccctggacaagggcttgagtggatgggatggatcaacaccaacactgggaacccaacgtatggccaggccttcacaggacgatttgtcttctcctttgacacctctgtcggcacggcatatctgcacatcagcggcctgcagcctggagacactgccttctattactgtgtgagagaggacctgagacttagacaggtgtggtggcggtggttcgacccctggggccagggaaccctggtcaccgtctcctcag

SEQ ID NO: 9261 - DNA, 322 bp, Artificial sequence
  Synthetic antibody
gagatccagatgacccagtcaccatcctccctgtctgcctctgtaggagacagagtcaccatttcttgtcgggcaagtcagagcgtcggcggtcatttaaattggtatcagcagaaaccggggaaagcccctaaggtcctgatccacgctgcttccagtttagaaggtggggtcccttcacggttcagtggcagtggatctgggacagattacactctcaccatcaccaaccttcagcctgaagattttgcgacttacttctgccagcagagtcgcaactcccctgcgacgttcggccaagggaccaaggtggagatgaaac

SEQ ID NO: 9262 - DNA, 364 bp, Artificial sequence
  Synthetic antibody
caggtgcagctggtggagtctgggggaggcgtggtccagcctgggaggtccctgagactctcctgtgcagcctctggattcaccttcagtagctatgctatgcactgggtccgccaggctccaggcaaggggctggagtgggtggcagttatatcatatgatggaagcaataaatactacgcagactccgtgaagggccgattcaccatctccagagacaattccaagaacacgctgtatctgcaaatgaacagcctgagagctgaggacacggctgtgtattactgtgcgagaggaaaactggggatagtcggtgatgcttttgatatctggggccaagggacaatggtcaccgtctcttcag

SEQ ID NO: 9263 - DNA, 322 bp, Artificial sequence
  Synthetic antibody
gacatccagatgacccagtctccatcctccctgtctgcatctgtaggagacagagtcaccatcacttgccaggcgagtcaggacattagcaactatttaaattggtatcagcagaaaccagggaaagcccctaagctcctgatctacgatgcatccaatttggaaacaggggtcccatcaaggttcagtggaagtggatctgggacagattttactttcaccatcagcagcctgcagcctgaagatattgcaacatattactgtcaacagtatgataatctccctctcactttcggccctgggaccaaagtggatatcaaac

SEQ ID NO: 9264 - DNA, 355 bp, Artificial sequence; identical to SEQ ID NO: 9246
  Synthetic antibody

SEQ ID NO: 9265 - DNA, 325 bp, Artificial sequence; identical to SEQ ID NO: 9155
  Synthetic antibody

SEQ ID NO: 9266 - DNA, 382 bp, Artificial sequence; identical to SEQ ID NO: 9208
  Synthetic antibody

SEQ ID NO: 9267 - DNA, 322 bp, Artificial sequence; identical to SEQ ID NO: 9169
  Synthetic antibody

SEQ ID NO: 9268 - DNA, 366 bp, Artificial sequence
  Synthetic antibody
gaggtccagctggtacagtctggggctgaggtgaagaagcctggggctacagtgaaaatctcctgcaaggtttctggatacaccttcaccgactactacatgcactgggtgcaacaggcccctggaaaagggcttgagtggatgggacttgttgatcctgaagatggtgaaacaatatacgcagagaagttccagggcagagtcaccataaccgcggacacgtctacagacacagcctacatggagctgagcagcctgagatctgaggacacggccgtgtattactgtgcaacagtgtccaggtggtactactactactacggtatggacgtctggggccaagggaccacggtcaccgtctcctca

SEQ ID NO: 9269 - DNA, 322 bp, Artificial sequence; identical to SEQ ID NO: 9203
  Synthetic antibody

SEQ ID NO: 9270 - DNA, 359 bp, Artificial sequence; identical to SEQ ID NO: 9166
  Synthetic antibody

SEQ ID NO: 9271 - DNA, 337 bp, Artificial sequence
  Synthetic antibody
gatgttgtgatgactcagtctccactctccctgcccgtcacccttggacagccggcctccatctcctgcaggtctagtcaaagcctcgtatacagtgatggaaacacctacgtgaattggtttcagcagaggccaggccaatctccaaggcgcctaatctatcaggtttctatccgggcctctggggtcccagacagattcagcggcagtgggtcaggcactgatttcgcactgaaaatcagcagggtggaggctgaggatgttgggatttattattgcatgcaaggtacacactggccggtgacgttcggccaagggaccaaggtggaaatcaaac

SEQ ID NO: 9272 - DNA, 375 bp, Artificial sequence; identical to SEQ ID NO: 9232
  Synthetic antibody

SEQ ID NO: 9273 - DNA, 331 bp, Artificial sequence
  Synthetic antibody
cagtctgccctgactcagcctccctccgcgtccgggtctcctggacagtcagtcaccatctcctgcactggaagcagcaatgacgtcggtcgttataactatgtctcatggtaccaacatcacccaggcaaagcccccagactcatgatttctgaggtcgttaagcggccctcaggggtccctgatcgcttctctggctccaagtctggcaacacggcctccctgaccgtctctggactccaggctgaagatgaggctgattattactgcagctcatatggaggcaacaacattttactattcggcggagggaccaagctgaccgtcctag

SEQ ID NO: 9274 - DNA, 355 bp, Artificial sequence; identical to SEQ ID NO: 9216
  Synthetic antibody

SEQ ID NO: 9275 - DNA, 325 bp, Artificial sequence; identical to SEQ ID NO: 9155
  Synthetic antibody

SEQ ID NO: 9276 - DNA, 352 bp, Artificial sequence
  Synthetic antibody
gagatgcagctggtggagtccgggggaggcttagttcagccgggggggtccctgagactctcctgtgcagcctctggattcaccttcagtgactactacatgtactgggtccgccaagctccagggaaggggctggtgtgggtctcacgtattaagcctgatgggactggcacaagttacgcggactccgtgaggggccgattcaccgtctccagagacaacgccaagaacacgctgaatctgcaaatgaacagtctgagagccgaggacacggctgtgtattattgtgtggcctacaactggaactacgacttctgctggggccagggaaccctggtaaccgtctccgcag

SEQ ID NO: 9277 - DNA, 337 bp, Artificial sequence
  Synthetic antibody
gatgttactgtgactcagtctccactctccctgcccgtcacccttggacagccggcctccatctcctgcaggtctagtcaaagcctcgtatacagtgatggaaacacctacttgaattggtttcagcagaggccaggccaatctccaaggcgcctaatttatcaggtttctaaccgggactctggggtcccagacagattcagcggcagtgggtcaggcactgatttcacactgacaattagcagggtggaggctgaagatgttggggtttattactgcatgcaaggttcatactggccattcactttcggccctgggaccaaagtggatatcaaac

SEQ ID NO: 9278 - DNA, 376 bp, Artificial sequence
  Synthetic antibody
gaggtgcaattggtggagtctgggggaggcttggtccagccgggggggtccctgaggctctcctgttcagcctctggattcagttacagtaattattggatgacttgggtccgacaggctccagggaaggggctggagtgggtggccaacctaagacgagatggaagtgtggagcactatgtggactctgtgaggggccgattcaccatctccagagacaacgccaagaactccctgtatctacaaatggacagcctgagagccgaggacacggctgtgtattactgtgcgagagatttaagtcccggcggtttgggggcctattacgatgtttttgatatctggggccaagggacaatggtcaccgtctcttcag

SEQ ID NO: 9279 - DNA, 322 bp, Artificial sequence
  Synthetic antibody
gccatccagatgacccagtctccatcctccctgtctgcatctttgggagacagaatctccatcacttgccgggcaagtcagggcattggaaatgagttgggctggtatcagcagaaaccaggtaaagcccctagactcctcatctatgctggttccactttacaaggtggagtcccaccaaggttcagcggctctggatctggcacagatttcactctcaccataagcagcctgcaggctgaagattttgcaacatattattgtctgcaagattacgcctaccctcggacgttcggcccagggaccaaggtggaagtcaaac

SEQ ID NO: 9280 - DNA, 375 bp, Artificial sequence; identical to SEQ ID NO: 9232
  Synthetic antibody

SEQ ID NO: 9281 - DNA, 322 bp, Artificial sequence; identical to SEQ ID NO: 9203
  Synthetic antibody

SEQ ID NO: 9282 - DNA, 367 bp, Artificial sequence
  Synthetic antibody
gaggtgcagctgttggagtctgggggaggcttggtacagcctggggggtccctgagactctcctgtgcagcctctggattcacctttagcagctatgccatgagctgggtccgccaggctccagggaaggggctggagtgggtctcagctattagtggtagtggtggtagcacatactacgcagactccgtgaagggccggttcaccatctccagagacaattccaagaacacgctgtatctgcaaatgaacagcctgagagccgaggacacggccgtatattactgtgcgaaagatcaacacatggttcggggagctataggctttgactactggggccagggaaccctggtcaccgtctcctcag

SEQ ID NO: 9283 - DNA, 319 bp, Artificial sequence
  Synthetic antibody
gaaatagtgatgacgcagtctccagccaccctgtctgtgtctccaggggaaagagccaccctctcctgcagggccagtcagagtgttagcagcaacttagcctggtaccagcagaaacctggccaggctcccaggctcctcatctatggtgcatccaccagggccactggtatcccagccaggttcagtggcagtgggtctgggacagagttcactctcaccatcagcagcctgcagtctgaagattttgcagtttattactgtcagcagtataataactggcggacgttcggccaagggaccaaggtggaaatcaaac

SEQ ID NO: 9284 - DNA, 361 bp, Artificial sequence; identical to SEQ ID NO: 9156
  Synthetic antibody

SEQ ID NO: 9285 - DNA, 322 bp, Artificial sequence
  Synthetic antibody
gacatccagatgacccagtctccatcttctgtgtctgcatctgtaggagacagagtcaccatcacttgtcgggcgagtcagggtattaacagctggttagcctggtatcagcagaaaccagggaaagcccctaagctcctgatctatgctgcatccagtttgcaaagtggggtcccatcaaggttcagcggcagtggatctgggacagatttcactctcactatcagcagcctgcagcctgaagattttgcaacttactattgtcaacaggctcacagtttcccaatcaccttcggccaagggacacgactggagattaaac

SEQ ID NO: 9286 - DNA, 375 bp, Artificial sequence; identical to SEQ ID NO: 9232
  Synthetic antibody

SEQ ID NO: 9287 - DNA, 325 bp, Artificial sequence; identical to SEQ ID NO: 9155
  Synthetic antibody

SEQ ID NO: 9288 - DNA, 354 bp, Artificial sequence
  Synthetic antibody
caggtgcaactggtacaatccgggggaggcgtggtccagcctgggaggtccctgagactctcctgtacagcctctggattcaccttcagtaattatgctatgcactgggtccgccaggccccaggcaaggggctggagtggggggcagttatatcatatgacggaactattacactctatgaagactccatgaggggccgcttcaccatctccagagacaattccagggacaccctgtatctgcaaatgaatagtctgcgacctgatgacacggctgtatattactgtgggagagacctctctggggggggtttggacgtctggggccaagggaccacggtcaccgtctcctca

SEQ ID NO: 9289 - DNA, 329 bp, Artificial sequence
  Synthetic antibody
cagtctgccctgactcaggctcgctcagtgtccgggtctcctggacagtcagtcaccgtctcctgcactggaagcagcaatgatgttggtggtcataactatgtctcctggtaccagcatagcccaggcaaagcccccaaactcattatttatgatgtcactaaacggccctctggggtccctgatcgcttctccggctccaagtctggcgacacggcctccctgaccatctctgggctccaggctgacgatgaaggtgattattactgctgctcatataagagtacttacgactatgtcttcggaagtgggaccacggtctccgtcct

SEQ ID NO: 9290 - DNA, 364 bp, Artificial sequence
  Synthetic antibody
caggtgcagctggtggagtctgggggaggcgtggtccagcctgggaggtccctgagactctcctgtgcagcctctggattcaccttcagtatctatgctatccactgggtccgccaggctccaggcaaggggctggagtggatggcagttatatcatatgatggaaataatcaatactacgcagactccgtgaagggccgattcaccatctccagagacaattccaagaacacgctgtatctgcaaatgaacagcctgagaactgacgacacggctgtctattactgtgcgaggagcgagggagggggttaccatgatgcttttgatatctggggccaagggacaatggtcaccgtctcttcag

SEQ ID NO: 9291 - DNA, 334 bp, Artificial sequence
  Synthetic antibody
cagcttgtgctgactcaatcgccctctgcctctgcctccctgggagcctcggtcaaactcacctgcactctgagcagtgggcacagcagctacgccatcgcgtggcatcagcagcagccagagaagggccctcggtacttgatgaagcttaacagtgatggcagccacaacaagggggacgggatccctgatcgcttctcaggctccagctctggggctgagcgctacctcaccatctccagcctccagtctgaggatgaggctgactatttctgtcagacctggggcactggcattcacgtgttcggcggagggaccaagctgaccgtcctag

SEQ ID NO: 9292 - DNA, 355 bp, Artificial sequence; identical to SEQ ID NO: 9216
  Synthetic antibody

SEQ ID NO: 9293 - DNA, 328 bp, Artificial sequence
  Synthetic antibody
tcctttgagctgacacagccaccctcgctgtcagtgtccccaggacagacggccaggatcacctgctctggagatgcattgtcaaagcaatttacttattggtaccagcagaagccaggccaggcccctgtgttggtgatttataaagacagtgagcggccctcagggatccctgagcgattctctggctccagctcagggacaacagtcacgttgaccatcagtggagtccaggcagaagacgaggctgactattactgtcaatcagcacacagcagtggtttttatcgtgtggtattcggcggagggaccaagctgaccgtcctag

SEQ ID NO: 9294 - DNA, 373 bp, Artificial sequence; identical to SEQ ID NO: 9160
  Synthetic antibody

SEQ ID NO: 9295 - DNA, 322 bp, Artificial sequence; identical to SEQ ID NO: 9169
  Synthetic antibody

SEQ ID NO: 9296 - DNA, 382 bp, Artificial sequence; identical to SEQ ID NO: 9208
  Synthetic antibody

SEQ ID NO: 9297 - DNA, 340 bp, Artificial sequence; identical to SEQ ID NO: 9171
  Synthetic antibody

SEQ ID NO: 9298 - DNA, 361 bp, Artificial sequence; identical to SEQ ID NO: 9156
  Synthetic antibody

SEQ ID NO: 9299 - DNA, 322 bp, Artificial sequence; identical to SEQ ID NO: 9203
  Synthetic antibody

SEQ ID NO: 9300 - DNA, 352 bp, Artificial sequence; identical to SEQ ID NO: 9168
  Synthetic antibody

SEQ ID NO: 9301 - DNA, 325 bp, Artificial sequence; identical to SEQ ID NO: 9155
  Synthetic antibody

SEQ ID NO: 9302 - protein, 118 aa, Artificial sequence
  Synthetic antibody
QVQLVQSGSELQKPGASVKVSCKASGNTFPTYDMNWVRQAPGQGLEWMGWINTNTGSPTYAQGLPGRFVFSLDTSVSTAYLEISSLKAEDTAVYYCAREGYHYGMDVWGQGTTVTVSS

SEQ ID NO: 9303 - protein, 107 aa, Artificial sequence
  Synthetic antibody
DIQMTQSPSSLSASVGDRVTITCRASQDINNYLAWFQQKPGKAPKSLIYSASSLQSGVPSRFSGSGSGTDFTLTISSLQPEDFATYYCQQYRSYPRTFGQGTKLEIK

SEQ ID NO: 9304 - protein, 119 aa, Artificial sequence
  Synthetic antibody
QAHLVQSGAEVKKPGSSVKVSCKASGGTFNSHAIGWVRQAPGQGLEWMGRIVPIRKTTTYAPQLQGRLTLTADTSTSTLYMELSSLRSEDSARYYCARVILSGRGFDIWGQGSLVAVSS

SEQ ID NO: 9305 - protein, 108 aa, Artificial sequence
  Synthetic antibody
SYELTQPPSVSVSPGQTARIICSGDALPKQNAYWYQKKPGQAPVLVIFKDSERPSGIPQRFSGSSSGTTVTLTISGVQAEDEADYYCQSADSSGTYVVFGGGTKLTVL

SEQ ID NO: 9306 - protein, 120 aa, Artificial sequence
  Synthetic antibody
EVQLVESGGGLVQPGGSLRLSCAASGFIFSNFWMNWVRQAPGKGLEWVANIQQDGSEKYYVDSVKGRFTISTDLAKNSLYLQMNSLRAEDTAVYYCARQHGDYDWYFDYWGQGTLVTVSS

SEQ ID NO: 9307 - protein, 108 aa, Artificial sequence; identical to SEQ ID NO: 9305
  Synthetic antibody

SEQ ID NO: 9308 - protein, 120 aa, Artificial sequence; identical to SEQ ID NO: 9306
  Synthetic antibody

SEQ ID NO: 9309 - protein, 107 aa, Artificial sequence; identical to SEQ ID NO: 9303
  Synthetic antibody

SEQ ID NO: 9310 - protein, 124 aa, Artificial sequence
  Synthetic antibody
EVQLLESGGGLVQPGGSLRLSCAASGFTFSSYAVYWVRQAPGKGLECVSFISGGGETTDYADSVKGRFTISRDNSKNTLYLQMNGLRAEDTAVYYCAKSPDATFLWFGEPFGYWGQGTLVTVSS

SEQ ID NO: 9311 - protein, 108 aa, Artificial sequence
  Synthetic antibody
EIVLTQSPGTLSLSPGERATLSCRASESVSSNYLAWYQQKPGQAPRLLIYDASSRATGIPDRFSGSGSGTDFTLTISKLEPEDFAVYYCQQYARAPDTFAQGTRLEIK

SEQ ID NO: 9312 - protein, 121 aa, Artificial sequence
  Synthetic antibody
QVQLVESGGGVVQPGRSLRLSCAASGFTFSSYAMHWVRQAPGKGLEWVAVISYDGSNKYYADSVKGRFTISRDNSKNTLYLQMNSLRAEDTAVYYCARDPNPMVLAYFDYWGQGTLVTVSS

SEQ ID NO: 9313 - protein, 110 aa, Artificial sequence
  Synthetic antibody
QTVVTQEPSFSVSPGGTVTLTCGLSSGSVSTSYYPSWYQQTPGQAPRTLIYSTNTRSSGVPDRFSGSILGNKAALTITGAQADDESDYYCVLYMGSGIWVFGGGTKLTVL

SEQ ID NO: 9314 - protein, 124 aa, Artificial sequence; identical to SEQ ID NO: 9310
  Synthetic antibody

SEQ ID NO: 9315 - protein, 108 aa, Artificial sequence; identical to SEQ ID NO: 9305
  Synthetic antibody

SEQ ID NO: 9316 - protein, 120 aa, Artificial sequence
  Synthetic antibody
QVQLVESGGGVVQPGRSLRLSCAASGFNLSNYAMHWVRQASGKGLEWVSLISYDGSIKYYTDSVKGRFTVSGDNSKNTLFLQMNSLRPDDSALYYCVRGGVSGPNSFDMWGQGTTVTVSS

SEQ ID NO: 9317 - protein, 108 aa, Artificial sequence; identical to SEQ ID NO: 9305
  Synthetic antibody

SEQ ID NO: 9318 - protein, 117 aa, Artificial sequence
  Synthetic antibody
EVQLVESGGGLVQPGGSLTLSCAASGLTIRNYWMNWVRQAPGKGLEWVANMEEDGSEKNYVDSVKGRFIISRDDAKNSLYLQMNSLRAEDTAVYYCTRDPGPGDFSWGQGTVVTVSS

SEQ ID NO: 9319 - protein, 107 aa, Artificial sequence
  Synthetic antibody
EIVLTQSPATLSVSPGERVTLSCRASQTVNNNLNWLQHKPGQAPRLVIIGTSTRASGVPARFSGSGSGTEFTLTISSLQSEDYAIYYCQQYYEWPPITYGQGTRLEI

SEQ ID NO: 9320 - protein, 124 aa, Artificial sequence
  Synthetic antibody
QVQLQQSGPGLVRPSGTLSLTCGVSGGSISSPNWWSWVRQAPGKGLEWIGEVYPTGNTYYNPSLKSRVTISIEESKNEFSLNLSSVTAADMGIYYCARGVVGASDFYYYGMDVWGQGTAVTVSS

SEQ ID NO: 9321 - protein, 113 aa, Artificial sequence
  Synthetic antibody
EIVMTQSPDSLTVSLGERATISCKSSQSLLYSSNNRDYLAWYQQKAGQPPKLLFYWASTRESGVPDRFGGSGSGTHFTLTIYNLQPEDVAVYFCQQYFSPPYTFGQGTKLEIK

SEQ ID NO: 9322 - protein, 121 aa, Artificial sequence
  Synthetic antibody
QVQLQESGPGLVKPSQTLSLNCSVSGDSISRSDYHWSWIRQHPGKGLEWIGYIYNNGDTYYNPSLKSRVTMSVDTSKNEFSLKLTSVTAADTAVYYCARDGYAGNSEALDYWGQGTLVTVS

SEQ ID NO: 9323 - protein, 109 aa, Artificial sequence
  Synthetic antibody
EIVLTQSPASLSLSPGERATLSCRASQSVTNYLAWYQQRPGQAPRLLIYQTSNRATGIPARFSGSGSGTDFTLTISSLEPEDFAFYYCQQRSHRPGGITFGQGTRLEIK

SEQ ID NO: 9324 - protein, 120 aa, Artificial sequence; identical to SEQ ID NO: 9306
  Synthetic antibody

SEQ ID NO: 9325 - protein, 107 aa, Artificial sequence
  Synthetic antibody
DIQMTQSPSSLSASVGDRVTITCQASQDISNYLNWYQQKPGKAPKLLIYDASNLETGVPSRFSGSGSGTDFTFTISSLQPEDIATYYCQQYDNLPLTFGPGTKVDIK

SEQ ID NO: 9326 - protein, 120 aa, Artificial sequence; identical to SEQ ID NO: 9306
  Synthetic antibody

SEQ ID NO: 9327 - protein, 113 aa, Artificial sequence; identical to SEQ ID NO: 9321
  Synthetic antibody

SEQ ID NO: 9328 - protein, 122 aa, Artificial sequence
  Synthetic antibody
EVQLVESGGGLVKPGESLRLSCAASKFTFSTYHMNWIRQAPGKGLEWVSAISADSTVTTYADSVRGRFIISRDNDKNSLYLQMNGLRVDDLAVYYCARGRARGSDHTGFDSWGQGTLVTVSS

SEQ ID NO: 9329 - protein, 113 aa, Artificial sequence
  Synthetic antibody
DIVMTQSPLSLSVTPGEPASISCRSSQSLLHRNGYNILDWYLQKPGQSPQLLIYLGSNRASGVPDRFSGSGSGTDFTLKISRVEAEDVGVYYCMQGLQTPPYTFGQGTKLEIK

SEQ ID NO: 9330 - protein, 120 aa, Artificial sequence; identical to SEQ ID NO: 9306
  Synthetic antibody

SEQ ID NO: 9331 - protein, 107 aa, Artificial sequence
  Synthetic antibody
DIQMTQSPSSLSASVGDRVTITCRASQSITTYLNWYQQKAGKAPNLLIYAPSNLQSGVPSRFSGSGSGTDFTLTISSLQPEDFGTYYCQQSYSSPFTFGPGTKVDIK

SEQ ID NO: 9332 - protein, 120 aa, Artificial sequence; identical to SEQ ID NO: 9306
  Synthetic antibody

SEQ ID NO: 9333 - protein, 107 aa, Artificial sequence; identical to SEQ ID NO: 9319
  Synthetic antibody

SEQ ID NO: 9334 - protein, 124 aa, Artificial sequence; identical to SEQ ID NO: 9320
  Synthetic antibody

SEQ ID NO: 9335 - protein, 108 aa, Artificial sequence; identical to SEQ ID NO: 9305
  Synthetic antibody

SEQ ID NO: 9336 - protein, 112 aa, Artificial sequence
  Synthetic antibody
QVQLQESGPGLVKPSETLSLTCTVSGGSISSYYWSWIRQPPGKGLEYIGYIYYSGSTNYNPSLKSRVTISVDTSKNQLSLKLRSVTAADTAVYYCARGFDYWGQGTLVTVSS

SEQ ID NO: 9337 - protein, 108 aa, Artificial sequence
  Synthetic antibody
EIVLTQSPGTLSLSPGERATLSCRASQSVSSSYLAWYQQKPGQAPRLLIYGTSSRATGIPDRFSGSGSGTDFTLTISRLEPEDFAVFYCQQYGNSPWTFGQGTKVEIK

SEQ ID NO: 9338 - protein, 117 aa, Artificial sequence; identical to SEQ ID NO: 9318
  Synthetic antibody

SEQ ID NO: 9339 - protein, 108 aa, Artificial sequence
  Synthetic antibody
EIVLTQSPATLSLSPGERATLSCRASQSVSSYLAWYQQKPGQAPRLLIFDASNRATGIPARFSGSGSGTDFTLTISSLEPEDFAVYFCQQRSSWQGITFGGGTKVEIK

SEQ ID NO: 9340 - protein, 120 aa, Artificial sequence; identical to SEQ ID NO: 9306
  Synthetic antibody

SEQ ID NO: 9341 - protein, 108 aa, Artificial sequence; identical to SEQ ID NO: 9339
  Synthetic antibody

SEQ ID NO: 9342 - protein, 124 aa, Artificial sequence; identical to SEQ ID NO: 9320
  Synthetic antibody

SEQ ID NO: 9343 - protein, 106 aa, Artificial sequence
  Synthetic antibody
EIVLTQSPATPSLSPGERATLSCRASQSVSSYLAWYQQKPGQAPRLLIFDASNRATGIPARFSGSGSGTDFTLTISSLESEDFGTYYCQQYNHWRTFGQGTKVEIK

SEQ ID NO: 9344 - protein, 117 aa, Artificial sequence; identical to SEQ ID NO: 9318
  Synthetic antibody

SEQ ID NO: 9345 - protein, 113 aa, Artificial sequence; identical to SEQ ID NO: 9321
  Synthetic antibody

SEQ ID NO: 9346 - protein, 120 aa, Artificial sequence; identical to SEQ ID NO: 9306
  Synthetic antibody

SEQ ID NO: 9347 - protein, 108 aa, Artificial sequence; identical to SEQ ID NO: 9311
  Synthetic antibody

SEQ ID NO: 9348 - protein, 127 aa, Artificial sequence
  Synthetic antibody
QMQLVQSGAEVKKPGSSVKVSCKASGGTFINYAINWVRQAPGQRLEYMGGIIPLLGVANYTQRFQGRVTMTADRSTSTAYMELSNLAIEDTAVYYCAREYSSSRPLFYTYNYGMDVWGQGTTVTVSS

SEQ ID NO: 9349 - protein, 112 aa, Artificial sequence
  Synthetic antibody
DIVMTQTPLSLSVTPGQPASISCKSSQGLLHGDGKTYLYWFLQKAGQPPQLLIYEVSNRFSGVPDRFSGSGSGTDFTLKISRVEAEDVGIYYCMQSVHLPYTFGQGTKLEIK

SEQ ID NO: 9350 - protein, 117 aa, Artificial sequence; identical to SEQ ID NO: 9318
  Synthetic antibody

SEQ ID NO: 9351 - protein, 106 aa, Artificial sequence
  Synthetic antibody
SYELTQPPSVSVSPGQTASITCSGDKLGEKYACWYQQKPGQSPVLVIYQDTKRPSGIPERFSGSNSGNTATLTISGTQAVDEADYYCQAWDYTTVIFGGGTKLTVL

SEQ ID NO: 9352 - protein, 117 aa, Artificial sequence; identical to SEQ ID NO: 9318
  Synthetic antibody

SEQ ID NO: 9353 - protein, 107 aa, Artificial sequence
  Synthetic antibody
EIVLTQSPGTLSLSPGERATLSCRASQSVSSSYLAWYQQKPGQAPRLLIYGASSRATGIPDRFSGSGSGTDFTLTISRLEPEDFAVYYCQQYGSSYTFGQGTKLEIK

SEQ ID NO: 9354 - protein, 117 aa, Artificial sequence; identical to SEQ ID NO: 9318
  Synthetic antibody

SEQ ID NO: 9355 - protein, 107 aa, Artificial sequence
  Synthetic antibody
EIVLTQSPATLSLSPGERATLSCRASQSVSSYLAWYQQKPGQAPRLLIFDASNRATGIPARFSGSGSGTDFTLTISSLQPEDFATYYCQQYRSYPRTFGQGTKLEIK

SEQ ID NO: 9356 - protein, 117 aa, Artificial sequence; identical to SEQ ID NO: 9318
  Synthetic antibody

SEQ ID NO: 9357 - protein, 107 aa, Artificial sequence; identical to SEQ ID NO: 9331
  Synthetic antibody

SEQ ID NO: 9358 - protein, 127 aa, Artificial sequence
  Synthetic antibody
QVQLEQSGAEVKRPGSSVKVSCKGDGDTFSTYAITWVRQAPGQGLEWMGRIIPGLDLVDNQQKFQDRLTITADKSTTTAYMELRSLRSEDTAVYYCARGRRYDFLDGQYTSWYFDIWGRGTLVTVSS

SEQ ID NO: 9359 - protein, 112 aa, Artificial sequence
  Synthetic antibody
NIVMTQSPLSLPVTPGEPASMSCRSNQSLLYGNGYNYLDWYLQRPGQSPQLLIFLGSNRASGVPDRFSGSGSGTDFTLKINRVEAEDVGIYYCMQGQENPPTFGPGTKVEIK

SEQ ID NO: 9360 - protein, 124 aa, Artificial sequence; identical to SEQ ID NO: 9310
  Synthetic antibody

SEQ ID NO: 9361 - protein, 106 aa, Artificial sequence
  Synthetic antibody
EIVMTQSPATLSVSPGERATLSCRASQSVSSNLAWYQQKPGQAPRLLIYGASTRATGIPARFSGSGSGTDFTLTISSLQSEDFAVYYCQQYNNWRTFGQGTKVEIK

SEQ ID NO: 9362 - protein, 118 aa, Artificial sequence
  Synthetic antibody
QMQLVQSGTEVKKPGESLKISCKGSGYGFITYWIGWVRQMPGKGLEWMGIIYPGDSETRYSPSFQGQVTISADKSINTAYLQWSSLKASDTAIYYCAGGSGISTPMDVWGQGTTVTVS

SEQ ID NO: 9363 - protein, 86 aa, Artificial sequence
  Synthetic antibody
SVLYSSINKNYLAWYQQKPGQPPKLLIYWASTRESGVPDRFSGSGSGTDFTLTISSLQAEDVAVYYCQQYYSTPYTFGQGTKVEIK

SEQ ID NO: 9364 - protein, 125 aa, Artificial sequence
  Synthetic antibody
QVQLQESGPGLVKPSQTLSLTCTVSGGSISSGSHYWSWIRQPAGKGLEWVGRIYTSGSTNYNPSLERRVTISLGTSKNQFYLDLTSVTAADTAVYYCARDSLSGSYHYYYGMDVWGQGTSVTVSS

SEQ ID NO: 9365 - protein, 110 aa, Artificial sequence
  Synthetic antibody
QSVLTQPPSASGTPGQRVTISCSGSSSNIGSNYVYWYQHLPGTAPKLLIYRNYQRPSGVPDRFSGSKSGTSASLAISGLRSEDEGDYYCAVWDDSLSGWVFGGGTKLTVL

SEQ ID NO: 9366 - protein, 118 aa, Artificial sequence
  Synthetic antibody
QVQLVESGGGVVQPGRSLRLSCAASGFTFISYTMHWVRQAPGKGLEWVALISYDGYNKYYADSVKGRFTISRDNSKNTLYVQMNSLRAEDTALYYCAREGSPEAFDYWGQGTLVTVSS

SEQ ID NO: 9367 - protein, 107 aa, Artificial sequence; identical to SEQ ID NO: 9319
  Synthetic antibody

SEQ ID NO: 9368 - protein, 124 aa, Artificial sequence
  Synthetic antibody
EVQLVESGGGLVQPGGSRRLSCGASGFTFTNHWMSWVRQAPGKGLEWVASIKQDGAEKYYVDYLKGRFTISRDNAKNSLYLQMNSLRVEDTAVYYCARRITMALAGWGWGMDVWGQGTTVRVSS

SEQ ID NO: 9369 - protein, 112 aa, Artificial sequence
  Synthetic antibody
DIVMTQSPLSLPVTPGEPASISCRSSRSLLSRNGYNYLDWYLQRPGQSPQLVIYLGSNRASGVPDRFSGSGSGTDFTLKISRVEAEDVGLYYCMQAMQAPLTFGPGTKVEIK

SEQ ID NO: 9370 - protein, 126 aa, Artificial sequence
  Synthetic antibody
QVQLVQSGSELKKPGASVKVSCKTSGYTFTSYAINWVRQAPGQGLEWIGWININTGNPTYAQGFTGRVDFSLDTSVSTAYLQIRSLKAEDTAVYYCARDRGIAARRGYYYYGMDVWGQGTTVTVSS

SEQ ID NO: 9371 - protein, 108 aa, Artificial sequence; identical to SEQ ID NO: 9305
  Synthetic antibody

SEQ ID NO: 9372 - protein, 127 aa, Artificial sequence; identical to SEQ ID NO: 9358
  Synthetic antibody

SEQ ID NO: 9373 - protein, 108 aa, Artificial sequence; identical to SEQ ID NO: 9305
  Synthetic antibody

SEQ ID NO: 9374 - protein, 112 aa, Artificial sequence; identical to SEQ ID NO: 9336
  Synthetic antibody

SEQ ID NO: 9375 - protein, 108 aa, Artificial sequence; identical to SEQ ID NO: 9305
  Synthetic antibody

SEQ ID NO: 9376 - protein, 121 aa, Artificial sequence
  Synthetic antibody
QVQLQQWGAGLLKPSETLSLTCAVHGGSFSGPYWTWIRQSPSQGLEWIGEIGPRGITYYSPSLESRVTISADTSRNQFSLRLTSVTAADTAVYYCARGLVIGRSSLNFDSWGQGTLVTVSS

SEQ ID NO: 9377 - protein, 108 aa, Artificial sequence; identical to SEQ ID NO: 9311
  Synthetic antibody

SEQ ID NO: 9378 - protein, 119 aa, Artificial sequence
  Synthetic antibody
EVQLVEAGGGLVKPGGSLRLSCAASGFTFSGYAINWVRQAPGKGLEWVSSISGNNNDMYYADSVKGRFTISRDNAKSSVFLQMNSLRVEDTAIYYCARDNLALAGEDYWGQGTLVTVSS

SEQ ID NO: 9379 - protein, 113 aa, Artificial sequence; identical to SEQ ID NO: 9321
  Synthetic antibody

SEQ ID NO: 9380 - protein, 124 aa, Artificial sequence; identical to SEQ ID NO: 9310
  Synthetic antibody

SEQ ID NO: 9381 - protein, 107 aa, Artificial sequence
  Synthetic antibody
EIVMTQSPATLSVSPGERVTLSCRASQSVSSNVAWYQQKPGQAPSLLIYGASTRATGTPARFSGSGSGTGFTLTITSLQSEDFGVYYCQQYNNWRFTFGPGTKVEIK

SEQ ID NO: 9382 - protein, 125 aa, Artificial sequence
  Synthetic antibody
EVQLLESGGGLVQPGGSLRLSCAASGFVFSDYSMNWVRLAPGKGLAWVSVVGVDAVTKFYEDSVKGRFTISRDNSKNTIYLQMNNLRAEDTAVYHCAKSQPVSRMGRFFVGLDVWGQGTTVTVSS

SEQ ID NO: 9383 - protein, 113 aa, Artificial sequence; identical to SEQ ID NO: 9321
  Synthetic antibody

SEQ ID NO: 9384 - protein, 122 aa, Artificial sequence
  Synthetic antibody
EVQLVESGGGLVKPGGSLRLSCAASGFTFSSYSMNWVRQAPGKGLEWVSSISSTSSYIYYADSVKGRFTISRDNAKNSLYLQMNSLRAEDTAVYYCARRRAATGTEFYFDYWGQGTLVTVSS

SEQ ID NO: 9385 - protein, 110 aa, Artificial sequence
  Synthetic antibody
QSVLTQPPSVSAAPGQKVTISCSGSSSNIGNNYVSWYQQLPGTAPKLLIYDNNKRPSGIPDRFSGSKSGTSATLGITGLQTGDEADYYCGTWDSSLSAVLFGGGTKLTVL

SEQ ID NO: 9386 - protein, 119 aa, Artificial sequence; identical to SEQ ID NO: 9304
  Synthetic antibody

SEQ ID NO: 9387 - protein, 104 aa, Artificial sequence
  Synthetic antibody
DIQMTQSPSALAASLGDRVIITCQASHDIGHNLNWYQQRPGEAPQLLIYDVSNLQTGVPSRFSGFGFGTNFTFTISGLQSEDIGTYYCQQYDSIFGPGTKLEIK

SEQ ID NO: 9388 - protein, 127 aa, Artificial sequence
  Synthetic antibody
QVQLVQSGAEVKKPGSSVKVSCKASGGTFSSYAFSWVRQAPGQGLEWMGRIILILGITDYAPKFQGRVTITADKSTSTVYMEVSSLRSDDTAVYYCARERPRDPSSNYVAYYAMDVWGQGTSVTVSS

SEQ ID NO: 9389 - protein, 107 aa, Artificial sequence; identical to SEQ ID NO: 9331
  Synthetic antibody

SEQ ID NO: 9390 - protein, 124 aa, Artificial sequence; identical to SEQ ID NO: 9320
  Synthetic antibody

SEQ ID NO: 9391 - protein, 107 aa, Artificial sequence
  Synthetic antibody
DIQMTQSPSSLSASVGDRVTITCRASETISNFLNWYLQRPGKAPQVLIYSAARLQSGVPSRFRASGSGTDFTLTITSLQLEDFGVYYCQQSFNTPRTFGQGTRVEIK

SEQ ID NO: 9392 - protein, 117 aa, Artificial sequence; identical to SEQ ID NO: 9318
  Synthetic antibody

SEQ ID NO: 9393 - protein, 108 aa, Artificial sequence; identical to SEQ ID NO: 9311
  Synthetic antibody

SEQ ID NO: 9394 - protein, 125 aa, Artificial sequence
  Synthetic antibody
QVQLQQWGAGLLKPAETLSLTCAVHGGSFTDSYWSWIRQTPGQGLEWLGEVNHSGSTNYSPSLKTRVAISIDTSKNQVSLRLTSVSAADTAVYYCARGMAVRGRQLYLLGGYDLWGQGTLVTVSS

SEQ ID NO: 9395 - protein, 106 aa, Artificial sequence
  Synthetic antibody
EVVMTQSPATLSVSPGERATLSCRASQSVYINLAWYQQKPGQPPRLLIYGASTRATGIPARFSGSGSGTEFTLTISSLESEDFGTYYCQQYNHWRTFGQGTKVEIK

SEQ ID NO: 9396 - protein, 118 aa, Artificial sequence
  Synthetic antibody
SQLLQESGPGLVKPSETLSLTCTVFGDSIYGYYWTWIRQPPGRGLEWIGSVYHSGSTNYNPSLMSRVTISVDTSEKQFSLKVTSVTGADTAVYFCARGLAGGGYFDAWGQGNLVAVSS

SEQ ID NO: 9397 - protein, 107 aa, Artificial sequence
  Synthetic antibody
DVQMTQSPSSLSASVGDRVTITCRASPGINTYLAWYQQKPGQVPDLLIYGASTLRSGVPSRFSGSGSGTDFTLTISSLQLEDVATYYCQAYYVGLGTFGQGTKVEIK

SEQ ID NO: 9398 - protein, 119 aa, Artificial sequence
  Synthetic antibody
EVQLVESGGGVVRPGESLRLSCVGSGFPFGGYGMSWVRQVPGKGLEWVSGINWSADRRVYADFVKGRFTISRDYPKKSVSLQMDNLRAEDTALYYCARERTSRRDFDFWGQGTLVTVSS

SEQ ID NO: 9399 - protein, 108 aa, Artificial sequence
  Synthetic antibody
SFVLTQPPSVSVAPGQTARIPCAKNYRGSQTVHWYQRKPGQAPVLVINSDDDRPSGISERFSGSNSGNTATLTISRVEAGDEADYYCQVWDPSSDQALFAGGTTLTVL

SEQ ID NO: 9400 - protein, 121 aa, Artificial sequence
  Synthetic antibody
EVQLVDSGGGLVQPGGSLRLSCAASGFTFTSYWMNWVRQAPGKGLEWVANIKQDGSEKDYVDSVKGRFTISRDNAKNSLYLQMSSLRAEDTAVYYCARDLGSGSYHLFDYWGQGTLVTVSS

SEQ ID NO: 9401 - protein, 108 aa, Artificial sequence; identical to SEQ ID NO: 9305
  Synthetic antibody

SEQ ID NO: 9402 - protein, 126 aa, Artificial sequence; identical to SEQ ID NO: 9370
  Synthetic antibody

SEQ ID NO: 9403 - protein, 107 aa, Artificial sequence; identical to SEQ ID NO: 9331
  Synthetic antibody

SEQ ID NO: 9404 - protein, 119 aa, Artificial sequence; identical to SEQ ID NO: 9398
  Synthetic antibody

SEQ ID NO: 9405 - protein, 108 aa, Artificial sequence; identical to SEQ ID NO: 9305
  Synthetic antibody

SEQ ID NO: 9406 - protein, 121 aa, Artificial sequence; identical to SEQ ID NO: 9400
  Synthetic antibody

SEQ ID NO: 9407 - protein, 110 aa, Artificial sequence
  Synthetic antibody
QSVLTQPPSVSAAPGQKVTISCSGSSSNIGNNYVSWYQQLPGTAPKLLIYDNNKRPSGIPDRFSGSKSGTSATLGITGLQTGDEADYYCGTWDNSLSAWVFGGGTKLTVL

SEQ ID NO: 9408 - protein, 112 aa, Artificial sequence; identical to SEQ ID NO: 9336
  Synthetic antibody

SEQ ID NO: 9409 - protein, 108 aa, Artificial sequence; identical to SEQ ID NO: 9339
  Synthetic antibody

SEQ ID NO: 9410 - protein, 124 aa, Artificial sequence
  Synthetic antibody
QVQLVQSGSELKKPGASVKISCKTSGYNFTNHPINWVRQAPGQGLEWMGWINTNTGNPTYGQAFTGRFVFSFDTSVGTAYLHISGLQPGDTAFYYCVREDLRLRQVWWRWFDPWGQGTLVTVSS

SEQ ID NO: 9411 - protein, 107 aa, Artificial sequence
  Synthetic antibody
EIQMTQSPSSLSASVGDRVTISCRASQSVGGHLNWYQQKPGKAPKVLIHAASSLEGGVPSRFSGSGSGTDYTLTITNLQPEDFATYFCQQSRNSPATFGQGTKVEMK

SEQ ID NO: 9412 - protein, 121 aa, Artificial sequence
  Synthetic antibody
QVQLVESGGGVVQPGRSLRLSCAASGFTFSSYAMHWVRQAPGKGLEWVAVISYDGSNKYYADSVKGRFTISRDNSKNTLYLQMNSLRAEDTAVYYCARGKLGIVGDAFDIWGQGTMVTVSS

SEQ ID NO: 9413 - protein, 107 aa, Artificial sequence; identical to SEQ ID NO: 9325
  Synthetic antibody

SEQ ID NO: 9414 - protein, 118 aa, Artificial sequence; identical to SEQ ID NO: 9396
  Synthetic antibody

SEQ ID NO: 9415 - protein, 108 aa, Artificial sequence; identical to SEQ ID NO: 9305
  Synthetic antibody

SEQ ID NO: 9416 - protein, 127 aa, Artificial sequence; identical to SEQ ID NO: 9358
  Synthetic antibody

SEQ ID NO: 9417 - protein, 107 aa, Artificial sequence; identical to SEQ ID NO: 9319
  Synthetic antibody

SEQ ID NO: 9418 - protein, 122 aa, Artificial sequence
  Synthetic antibody
EVQLVQSGAEVKKPGATVKISCKVSGYTFTDYYMHWVQQAPGKGLEWMGLVDPEDGETIYAEKFQGRVTITADTSTDTAYMELSSLRSEDTAVYYCATVSRWYYYYYGMDVWGQGTTVTVSS

SEQ ID NO: 9419 - protein, 107 aa, Artificial sequence; identical to SEQ ID NO: 9353
  Synthetic antibody

SEQ ID NO: 9420 - protein, 120 aa, Artificial sequence; identical to SEQ ID NO: 9316
  Synthetic antibody

SEQ ID NO: 9421 - protein, 112 aa, Artificial sequence
  Synthetic antibody
DVVMTQSPLSLPVTLGQPASISCRSSQSLVYSDGNTYVNWFQQRPGQSPRRLIYQVSIRASGVPDRFSGSGSGTDFALKISRVEAEDVGIYYCMQGTHWPVTFGQGTKVEIK

SEQ ID NO: 9422 - protein, 125 aa, Artificial sequence; identical to SEQ ID NO: 9382
  Synthetic antibody

SEQ ID NO: 9423 - protein, 110 aa, Artificial sequence
  Synthetic antibody
QSALTQPPSASGSPGQSVTISCTGSSNDVGRYNYVSWYQHHPGKAPRLMISEVVKRPSGVPDRFSGSKSGNTASLTVSGLQAEDEADYYCSSYGGNNILLFGGGTKLTVL

SEQ ID NO: 9424 - protein, 118 aa, Artificial sequence; identical to SEQ ID NO: 9366
  Synthetic antibody

SEQ ID NO: 9425 - protein, 108 aa, Artificial sequence; identical to SEQ ID NO: 9305
  Synthetic antibody

SEQ ID NO: 9426 - protein, 117 aa, Artificial sequence
  Synthetic antibody
EMQLVESGGGLVQPGGSLRLSCAASGFTFSDYYMYWVRQAPGKGLVWVSRIKPDGTGTSYADSVRGRFTVSRDNAKNTLNLQMNSLRAEDTAVYYCVAYNWNYDFCWGQGTLVTVSA

SEQ ID NO: 9427 - protein, 112 aa, Artificial sequence
  Synthetic antibody
DVTVTQSPLSLPVTLGQPASISCRSSQSLVYSDGNTYLNWFQQRPGQSPRRLIYQVSNRDSGVPDRFSGSGSGTDFTLTISRVEAEDVGVYYCMQGSYWPFTFGPGTKVDIK

SEQ ID NO: 9428 - protein, 125 aa, Artificial sequence
  Synthetic antibody
EVQLVESGGGLVQPGGSLRLSCSASGFSYSNYWMTWVRQAPGKGLEWVANLRRDGSVEHYVDSVRGRFTISRDNAKNSLYLQMDSLRAEDTAVYYCARDLSPGGLGAYYDVFDIWGQGTMVTVSS

SEQ ID NO: 9429 - protein, 107 aa, Artificial sequence
  Synthetic antibody
AIQMTQSPSSLSASLGDRISITCRASQGIGNELGWYQQKPGKAPRLLIYAGSTLQGGVPPRFSGSGSGTDFTLTISSLQAEDFATYYCLQDYAYPRTFGPGTKVEVK

SEQ ID NO: 9430 - protein, 125 aa, Artificial sequence; identical to SEQ ID NO: 9382
  Synthetic antibody

SEQ ID NO: 9431 - protein, 107 aa, Artificial sequence; identical to SEQ ID NO: 9353
  Synthetic antibody

SEQ ID NO: 9432 - protein, 122 aa, Artificial sequence
  Synthetic antibody
EVQLLESGGGLVQPGGSLRLSCAASGFTFSSYAMSWVRQAPGKGLEWVSAISGSGGSTYYADSVKGRFTISRDNSKNTLYLQMNSLRAEDTAVYYCAKDQHMVRGAIGFDYWGQGTLVTVSS

SEQ ID NO: 9433 - protein, 106 aa, Artificial sequence
  Synthetic antibody
EIVMTQSPATLSVSPGERATLSCRASQSVSSNLAWYQQKPGQAPRLLIYGASTRATGIPARFSGSGSGTEFTLTISSLQSEDFAVYYCQQYNNWRTFGQGTKVEIK

SEQ ID NO: 9434 - protein, 120 aa, Artificial sequence; identical to SEQ ID NO: 9306
  Synthetic antibody

SEQ ID NO: 9435 - protein, 107 aa, Artificial sequence
  Synthetic antibody
DIQMTQSPSSVSASVGDRVTITCRASQGINSWLAWYQQKPGKAPKLLIYAASSLQSGVPSRFSGSGSGTDFTLTISSLQPEDFATYYCQQAHSFPITFGQGTRLEIK

SEQ ID NO: 9436 - protein, 125 aa, Artificial sequence; identical to SEQ ID NO: 9382
  Synthetic antibody

SEQ ID NO: 9437 - protein, 108 aa, Artificial sequence; identical to SEQ ID NO: 9305
  Synthetic antibody

SEQ ID NO: 9438 - protein, 118 aa, Artificial sequence
  Synthetic antibody
QVQLVQSGGGVVQPGRSLRLSCTASGFTFSNYAMHWVRQAPGKGLEWGAVISYDGTITLYEDSMRGRFTISRDNSRDTLYLQMNSLRPDDTAVYYCGRDLSGGGLDVWGQGTTVTVSS

SEQ ID NO: 9439 - protein, 110 aa, Artificial sequence
  Synthetic antibody
QSALTQARSVSGSPGQSVTVSCTGSSNDVGGHNYVSWYQHSPGKAPKLIIYDVTKRPSGVPDRFSGSKSGDTASLTISGLQADDEGDYYCCSYKSTYDYVFGSGTTVSVL

SEQ ID NO: 9440 - protein, 121 aa, Artificial sequence
  Synthetic antibody
QVQLVESGGGVVQPGRSLRLSCAASGFTFSIYAIHWVRQAPGKGLEWMAVISYDGNNQYYADSVKGRFTISRDNSKNTLYLQMNSLRTDDTAVYYCARSEGGGYHDAFDIWGQGTMVTVSS

SEQ ID NO: 9441 - protein, 111 aa, Artificial sequence
  Synthetic antibody
QLVLTQSPSASASLGASVKLTCTLSSGHSSYAIAWHQQQPEKGPRYLMKLNSDGSHNKGDGIPDRFSGSSSGAERYLTISSLQSEDEADYFCQTWGTGIHVFGGGTKLTVL

SEQ ID NO: 9442 - protein, 118 aa, Artificial sequence; identical to SEQ ID NO: 9366
  Synthetic antibody

SEQ ID NO: 9443 - protein, 109 aa, Artificial sequence
  Synthetic antibody
SFELTQPPSLSVSPGQTARITCSGDALSKQFTYWYQQKPGQAPVLVIYKDSERPSGIPERFSGSSSGTTVTLTISGVQAEDEADYYCQSAHSSGFYRVVFGGGTKLTVL

SEQ ID NO: 9444 - protein, 124 aa, Artificial sequence; identical to SEQ ID NO: 9310
  Synthetic antibody

SEQ ID NO: 9445 - protein, 107 aa, Artificial sequence; identical to SEQ ID NO: 9319
  Synthetic antibody

SEQ ID NO: 9446 - protein, 127 aa, Artificial sequence; identical to SEQ ID NO: 9358
  Synthetic antibody

SEQ ID NO: 9447 - protein, 113 aa, Artificial sequence; identical to SEQ ID NO: 9321
  Synthetic antibody

SEQ ID NO: 9448 - protein, 120 aa, Artificial sequence; identical to SEQ ID NO: 9306
  Synthetic antibody

SEQ ID NO: 9449 - protein, 107 aa, Artificial sequence; identical to SEQ ID NO: 9353
  Synthetic antibody

SEQ ID NO: 9450 - protein, 117 aa, Artificial sequence; identical to SEQ ID NO: 9318
  Synthetic antibody

SEQ ID NO: 9451 - protein, 108 aa, Artificial sequence; identical to SEQ ID NO: 9305
  Synthetic antibody

SEQ ID NO: 9452 - protein, 8 aa, Artificial sequence
  Synthetic antibody
GNTFPTYD

SEQ ID NO: 9453 - protein, 8 aa, Artificial sequence
  Synthetic antibody
INTNTGSP

SEQ ID NO: 9454 - protein, 11 aa, Artificial sequence
  Synthetic antibody
AREGYHYGMDV

SEQ ID NO: 9455 - protein, 8 aa, Artificial sequence
  Synthetic antibody
GGTFNSHA

SEQ ID NO: 9456 - protein, 8 aa, Artificial sequence
  Synthetic antibody
IVPIRKTT

SEQ ID NO: 9457 - protein, 12 aa, Artificial sequence
  Synthetic antibody
ARVILSGRGFDI

SEQ ID NO: 9458 - protein, 8 aa, Artificial sequence
  Synthetic antibody
GFIFSNFW

SEQ ID NO: 9459 - protein, 8 aa, Artificial sequence
  Synthetic antibody
IQQDGSEK

SEQ ID NO: 9460 - protein, 13 aa, Artificial sequence
  Synthetic antibody
ARQHGDYDWYFDY

SEQ ID NO: 9461 - protein, 8 aa, Artificial sequence
  Synthetic antibody
GFIFSNFW

SEQ ID NO: 9462 - protein, 8 aa, Artificial sequence
  Synthetic antibody
IQQDGSEK

SEQ ID NO: 9463 - protein, 13 aa, Artificial sequence
  Synthetic antibody
ARQHGDYDWYFDY

SEQ ID NO: 9464 - protein, 8 aa, Artificial sequence
  Synthetic antibody
GFTFSSYA

SEQ ID NO: 9465 - protein, 8 aa, Artificial sequence
  Synthetic antibody
ISGGGETT

SEQ ID NO: 9466 - protein, 17 aa, Artificial sequence
  Synthetic antibody
AKSPDATFLWFGEPFGY

SEQ ID NO: 9467 - protein, 8 aa, Artificial sequence
  Synthetic antibody
GFTFSSYA

SEQ ID NO: 9468 - protein, 8 aa, Artificial sequence
  Synthetic antibody
ISYDGSNK

SEQ ID NO: 9469 - protein, 14 aa, Artificial sequence
  Synthetic antibody
ARDPNPMVLAYFDY

SEQ ID NO: 9470 - protein, 8 aa, Artificial sequence
  Synthetic antibody
GFTFSSYA

SEQ ID NO: 9471 - protein, 8 aa, Artificial sequence
  Synthetic antibody
ISGGGETT

SEQ ID NO: 9472 - protein, 17 aa, Artificial sequence
  Synthetic antibody
AKSPDATFLWFGEPFGY

SEQ ID NO: 9473 - protein, 8 aa, Artificial sequence
  Synthetic antibody
GFNLSNYA

SEQ ID NO: 9474 - protein, 8 aa, Artificial sequence
  Synthetic antibody
ISYDGSIK

SEQ ID NO: 9475 - protein, 13 aa, Artificial sequence
  Synthetic antibody
VRGGVSGPNSFDM

SEQ ID NO: 9476 - protein, 8 aa, Artificial sequence
  Synthetic antibody
GLTIRNYW

SEQ ID NO: 9477 - protein, 8 aa, Artificial sequence
  Synthetic antibody
MEEDGSEK

SEQ ID NO: 9478 - protein, 10 aa, Artificial sequence
  Synthetic antibody
TRDPGPGDFS

SEQ ID NO: 9479 - protein, 9 aa, Artificial sequence
  Synthetic antibody
GGSISSPNW

SEQ ID NO: 9480 - protein, 7 aa, Artificial sequence
  Synthetic antibody
VYPTGNT

SEQ ID NO: 9481 - protein, 17 aa, Artificial sequence
  Synthetic antibody
ARGVVGASDFYYYGMDV

SEQ ID NO: 9482 - protein, 10 aa, Artificial sequence
  Synthetic antibody
GDSISRSDYH

SEQ ID NO: 9483 - protein, 7 aa, Artificial sequence
  Synthetic antibody
IYNNGDT

SEQ ID NO: 9484 - protein, 14 aa, Artificial sequence
  Synthetic antibody
ARDGYAGNSEALDY

SEQ ID NO: 9485 - protein, 8 aa, Artificial sequence
  Synthetic antibody
GFIFSNFW

SEQ ID NO: 9486 - protein, 8 aa, Artificial sequence
  Synthetic antibody
IQQDGSEK

SEQ ID NO: 9487 - protein, 13 aa, Artificial sequence
  Synthetic antibody
ARQHGDYDWYFDY

SEQ ID NO: 9488 - protein, 8 aa, Artificial sequence
  Synthetic antibody
GFIFSNFW

SEQ ID NO: 9489 - protein, 8 aa, Artificial sequence
  Synthetic antibody
IQQDGSEK

SEQ ID NO: 9490 - protein, 13 aa, Artificial sequence
  Synthetic antibody
ARQHGDYDWYFDY

SEQ ID NO: 9491 - protein, 8 aa, Artificial sequence
  Synthetic antibody
KFTFSTYH

SEQ ID NO: 9492 - protein, 8 aa, Artificial sequence
  Synthetic antibody
ISADSTVT

SEQ ID NO: 9493 - protein, 15 aa, Artificial sequence
  Synthetic antibody
ARGRARGSDHTGFDS

SEQ ID NO: 9494 - protein, 8 aa, Artificial sequence
  Synthetic antibody
GFIFSNFW

SEQ ID NO: 9495 - protein, 8 aa, Artificial sequence
  Synthetic antibody
IQQDGSEK

SEQ ID NO: 9496 - protein, 13 aa, Artificial sequence
  Synthetic antibody
ARQHGDYDWYFDY

SEQ ID NO: 9497 - protein, 8 aa, Artificial sequence
  Synthetic antibody
GFIFSNFW

SEQ ID NO: 9498 - protein, 8 aa, Artificial sequence
  Synthetic antibody
IQQDGSEK

SEQ ID NO: 9499 - protein, 13 aa, Artificial sequence
  Synthetic antibody
ARQHGDYDWYFDY

SEQ ID NO: 9500 - protein, 9 aa, Artificial sequence
  Synthetic antibody
GGSISSPNW

SEQ ID NO: 9501 - protein, 7 aa, Artificial sequence
  Synthetic antibody
VYPTGNT

SEQ ID NO: 9502 - protein, 17 aa, Artificial sequence
  Synthetic antibody
ARGVVGASDFYYYGMDV

SEQ ID NO: 9503 - protein, 8 aa, Artificial sequence
  Synthetic antibody
GGSISSYY

SEQ ID NO: 9504 - protein, 7 aa, Artificial sequence
  Synthetic antibody
IYYSGST

SEQ ID NO: 9505 - protein, 6 aa, Artificial sequence
  Synthetic antibody
ARGFDY

SEQ ID NO: 9506 - protein, 8 aa, Artificial sequence
  Synthetic antibody
GLTIRNYW

SEQ ID NO: 9507 - protein, 8 aa, Artificial sequence
  Synthetic antibody
MEEDGSEK

SEQ ID NO: 9508 - protein, 10 aa, Artificial sequence
  Synthetic antibody
TRDPGPGDFS

SEQ ID NO: 9509 - protein, 8 aa, Artificial sequence
  Synthetic antibody
GFIFSNFW

SEQ ID NO: 9510 - protein, 8 aa, Artificial sequence
  Synthetic antibody
IQQDGSEK

SEQ ID NO: 9511 - protein, 13 aa, Artificial sequence
  Synthetic antibody
ARQHGDYDWYFDY

SEQ ID NO: 9512 - protein, 9 aa, Artificial sequence
  Synthetic antibody
GGSISSPNW

SEQ ID NO: 9513 - protein, 7 aa, Artificial sequence
  Synthetic antibody
VYPTGNT

SEQ ID NO: 9514 - protein, 17 aa, Artificial sequence
  Synthetic antibody
ARGVVGASDFYYYGMDV

SEQ ID NO: 9515 - protein, 8 aa, Artificial sequence
  Synthetic antibody
GLTIRNYW

SEQ ID NO: 9516 - protein, 8 aa, Artificial sequence
  Synthetic antibody
MEEDGSEK

SEQ ID NO: 9517 - protein, 10 aa, Artificial sequence
  Synthetic antibody
TRDPGPGDFS

SEQ ID NO: 9518 - protein, 8 aa, Artificial sequence
  Synthetic antibody
GFIFSNFW

SEQ ID NO: 9519 - protein, 8 aa, Artificial sequence
  Synthetic antibody
IQQDGSEK

SEQ ID NO: 9520 - protein, 13 aa, Artificial sequence
  Synthetic antibody
ARQHGDYDWYFDY

SEQ ID NO: 9521 - protein, 8 aa, Artificial sequence
  Synthetic antibody
GGTFINYA

SEQ ID NO: 9522 - protein, 8 aa, Artificial sequence
  Synthetic antibody
IIPLLGVA

SEQ ID NO: 9523 - protein, 20 aa, Artificial sequence
  Synthetic antibody
AREYSSSRPLFYTYNYGMDV

SEQ ID NO: 9524 - protein, 8 aa, Artificial sequence
  Synthetic antibody
GLTIRNYW

SEQ ID NO: 9525 - protein, 8 aa, Artificial sequence
  Synthetic antibody
MEEDGSEK

SEQ ID NO: 9526 - protein, 10 aa, Artificial sequence
  Synthetic antibody
TRDPGPGDFS

SEQ ID NO: 9527 - protein, 8 aa, Artificial sequence
  Synthetic antibody
GLTIRNYW

SEQ ID NO: 9528 - protein, 8 aa, Artificial sequence
  Synthetic antibody
MEEDGSEK

SEQ ID NO: 9529 - protein, 10 aa, Artificial sequence
  Synthetic antibody
TRDPGPGDFS

SEQ ID NO: 9530 - protein, 8 aa, Artificial sequence
  Synthetic antibody
GLTIRNYW

SEQ ID NO: 9531 - protein, 8 aa, Artificial sequence
  Synthetic antibody
MEEDGSEK

SEQ ID NO: 9532 - protein, 10 aa, Artificial sequence
  Synthetic antibody
TRDPGPGDFS

SEQ ID NO: 9533 - protein, 8 aa, Artificial sequence
  Synthetic antibody
GLTIRNYW

SEQ ID NO: 9534 - protein, 8 aa, Artificial sequence
  Synthetic antibody
MEEDGSEK

SEQ ID NO: 9535 - protein, 10 aa, Artificial sequence
  Synthetic antibody
TRDPGPGDFS

SEQ ID NO: 9536 - protein, 8 aa, Artificial sequence
  Synthetic antibody
GDTFSTYA

SEQ ID NO: 9537 - protein, 8 aa, Artificial sequence
  Synthetic antibody
IIPGLDLV

SEQ ID NO: 9538 - protein, 20 aa, Artificial sequence
  Synthetic antibody
ARGRRYDFLDGQYTSWYFDI

SEQ ID NO: 9539 - protein, 8 aa, Artificial sequence
  Synthetic antibody
GFTFSSYA

SEQ ID NO: 9540 - protein, 8 aa, Artificial sequence
  Synthetic antibody
ISGGGETT

SEQ ID NO: 9541 - protein, 17 aa, Artificial sequence
  Synthetic antibody
AKSPDATFLWFGEPFGY

SEQ ID NO: 9542 - protein, 8 aa, Artificial sequence
  Synthetic antibody
GYGFITYW

SEQ ID NO: 9543 - protein, 8 aa, Artificial sequence
  Synthetic antibody
IYPGDSET

SEQ ID NO: 9544 - protein, 12 aa, Artificial sequence
  Synthetic antibody
AGGSGISTPMDV

SEQ ID NO: 9545 - protein, 10 aa, Artificial sequence
  Synthetic antibody
GGSISSGSHY

SEQ ID NO: 9546 - protein, 7 aa, Artificial sequence
  Synthetic antibody
IYTSGST

SEQ ID NO: 9547 - protein, 17 aa, Artificial sequence
  Synthetic antibody
ARDSLSGSYHYYYGMDV

SEQ ID NO: 9548 - protein, 8 aa, Artificial sequence
  Synthetic antibody
GFTFISYT

SEQ ID NO: 9549 - protein, 8 aa, Artificial sequence
  Synthetic antibody
ISYDGYNK

SEQ ID NO: 9550 - protein, 11 aa, Artificial sequence
  Synthetic antibody
AREGSPEAFDY

SEQ ID NO: 9551 - protein, 8 aa, Artificial sequence
  Synthetic antibody
GFTFTNHW

SEQ ID NO: 9552 - protein, 8 aa, Artificial sequence
  Synthetic antibody
IKQDGAEK

SEQ ID NO: 9553 - protein, 17 aa, Artificial sequence
  Synthetic antibody
ARRITMALAGWGWGMDV

SEQ ID NO: 9554 - protein, 8 aa, Artificial sequence
  Synthetic antibody
GYTFTSYA

SEQ ID NO: 9555 - protein, 8 aa, Artificial sequence
  Synthetic antibody
ININTGNP

SEQ ID NO: 9556 - protein, 19 aa, Artificial sequence
  Synthetic antibody
ARDRGIAARRGYYYYGMDV

SEQ ID NO: 9557 - protein, 8 aa, Artificial sequence
  Synthetic antibody
GDTFSTYA

SEQ ID NO: 9558 - protein, 8 aa, Artificial sequence
  Synthetic antibody
IIPGLDLV

SEQ ID NO: 9559 - protein, 20 aa, Artificial sequence
  Synthetic antibody
ARGRRYDFLDGQYTSWYFDI

SEQ ID NO: 9560 - protein, 8 aa, Artificial sequence
  Synthetic antibody
GGSISSYY

SEQ ID NO: 9561 - protein, 7 aa, Artificial sequence
  Synthetic antibody
IYYSGST

SEQ ID NO: 9562 - protein, 6 aa, Artificial sequence
  Synthetic antibody
ARGFDY

SEQ ID NO: 9563 - protein, 8 aa, Artificial sequence
  Synthetic antibody
GGSFSGPY

SEQ ID NO: 9564 - protein, 7 aa, Artificial sequence
  Synthetic antibody
IGPRGIT

SEQ ID NO: 9565 - protein, 15 aa, Artificial sequence
  Synthetic antibody
ARGLVIGRSSLNFDS

SEQ ID NO: 9566 - protein, 8 aa, Artificial sequence
  Synthetic antibody
GFTFSGYA

SEQ ID NO: 9567 - protein, 8 aa, Artificial sequence
  Synthetic antibody
ISGNNNDM

SEQ ID NO: 9568 - protein, 12 aa, Artificial sequence
  Synthetic antibody
ARDNLALAGEDY

SEQ ID NO: 9569 - protein, 8 aa, Artificial sequence
  Synthetic antibody
GFTFSSYA

SEQ ID NO: 9570 - protein, 8 aa, Artificial sequence
  Synthetic antibody
ISGGGETT

SEQ ID NO: 9571 - protein, 17 aa, Artificial sequence
  Synthetic antibody
AKSPDATFLWFGEPFGY

SEQ ID NO: 9572 - protein, 8 aa, Artificial sequence
  Synthetic antibody
GFVFSDYS

SEQ ID NO: 9573 - protein, 8 aa, Artificial sequence
  Synthetic antibody
VGVDAVTK

SEQ ID NO: 9574 - protein, 18 aa, Artificial sequence
  Synthetic antibody
AKSQPVSRMGRFFVGLDV

SEQ ID NO: 9575 - protein, 8 aa, Artificial sequence
  Synthetic antibody
GFTFSSYS

SEQ ID NO: 9576 - protein, 8 aa, Artificial sequence
  Synthetic antibody
ISSTSSYI

SEQ ID NO: 9577 - protein, 15 aa, Artificial sequence
  Synthetic antibody
ARRRAATGTEFYFDY

SEQ ID NO: 9578 - protein, 8 aa, Artificial sequence
  Synthetic antibody
GGTFNSHA

SEQ ID NO: 9579 - protein, 8 aa, Artificial sequence
  Synthetic antibody
IVPIRKTT

SEQ ID NO: 9580 - protein, 12 aa, Artificial sequence
  Synthetic antibody
ARVILSGRGFDI

SEQ ID NO: 9581 - protein, 8 aa, Artificial sequence
  Synthetic antibody
GGTFSSYA

SEQ ID NO: 9582 - protein, 8 aa, Artificial sequence
  Synthetic antibody
IILILGIT

SEQ ID NO: 9583 - protein, 20 aa, Artificial sequence
  Synthetic antibody
ARERPRDPSSNYVAYYAMDV

SEQ ID NO: 9584 - protein, 9 aa, Artificial sequence
  Synthetic antibody
GGSISSPNW

SEQ ID NO: 9585 - protein, 7 aa, Artificial sequence
  Synthetic antibody
VYPTGNT

SEQ ID NO: 9586 - protein, 17 aa, Artificial sequence
  Synthetic antibody
ARGVVGASDFYYYGMDV

SEQ ID NO: 9587 - protein, 8 aa, Artificial sequence
  Synthetic antibody
GLTIRNYW

SEQ ID NO: 9588 - protein, 8 aa, Artificial sequence
  Synthetic antibody
MEEDGSEK

SEQ ID NO: 9589 - protein, 10 aa, Artificial sequence
  Synthetic antibody
TRDPGPGDFS

SEQ ID NO: 9590 - protein, 8 aa, Artificial sequence
  Synthetic antibody
GGSFTDSY

SEQ ID NO: 9591 - protein, 7 aa, Artificial sequence
  Synthetic antibody
VNHSGST

SEQ ID NO: 9592 - protein, 19 aa, Artificial sequence
  Synthetic antibody
ARGMAVRGRQLYLLGGYDL

SEQ ID NO: 9593 - protein, 8 aa, Artificial sequence
  Synthetic antibody
GDSIYGYY

SEQ ID NO: 9594 - protein, 7 aa, Artificial sequence
  Synthetic antibody
VYHSGST

SEQ ID NO: 9595 - protein, 12 aa, Artificial sequence
  Synthetic antibody
ARGLAGGGYFDA

SEQ ID NO: 9596 - protein, 8 aa, Artificial sequence
  Synthetic antibody
GFPFGGYG

SEQ ID NO: 9597 - protein, 8 aa, Artificial sequence
  Synthetic antibody
INWSADRR

SEQ ID NO: 9598 - protein, 12 aa, Artificial sequence
  Synthetic antibody
ARERTSRRDFDF

SEQ ID NO: 9599 - protein, 8 aa, Artificial sequence
  Synthetic antibody
GFTFTSYW

SEQ ID NO: 9600 - protein, 8 aa, Artificial sequence
  Synthetic antibody
IKQDGSEK

SEQ ID NO: 9601 - protein, 14 aa, Artificial sequence
  Synthetic antibody
ARDLGSGSYHLFDY

SEQ ID NO: 9602 - protein, 8 aa, Artificial sequence
  Synthetic antibody
GYTFTSYA

SEQ ID NO: 9603 - protein, 8 aa, Artificial sequence
  Synthetic antibody
ININTGNP

SEQ ID NO: 9604 - protein, 19 aa, Artificial sequence
  Synthetic antibody
ARDRGIAARRGYYYYGMDV

SEQ ID NO: 9605 - protein, 8 aa, Artificial sequence
  Synthetic antibody
GFPFGGYG

SEQ ID NO: 9606 - protein, 8 aa, Artificial sequence
  Synthetic antibody
INWSADRR

SEQ ID NO: 9607 - protein, 12 aa, Artificial sequence
  Synthetic antibody
ARERTSRRDFDF

SEQ ID NO: 9608 - protein, 8 aa, Artificial sequence
  Synthetic antibody
GFTFTSYW

SEQ ID NO: 9609 - protein, 8 aa, Artificial sequence
  Synthetic antibody
IKQDGSEK

SEQ ID NO: 9610 - protein, 14 aa, Artificial sequence
  Synthetic antibody
ARDLGSGSYHLFDY

SEQ ID NO: 9611 - protein, 8 aa, Artificial sequence
  Synthetic antibody
GGSISSYY

SEQ ID NO: 9612 - protein, 7 aa, Artificial sequence
  Synthetic antibody
IYYSGST

SEQ ID NO: 9613 - protein, 6 aa, Artificial sequence
  Synthetic antibody
ARGFDY

SEQ ID NO: 9614 - protein, 8 aa, Artificial sequence
  Synthetic antibody
GYNFTNHP

SEQ ID NO: 9615 - protein, 8 aa, Artificial sequence
  Synthetic antibody
INTNTGNP

SEQ ID NO: 9616 - protein, 17 aa, Artificial sequence
  Synthetic antibody
VREDLRLRQVWWRWFDP

SEQ ID NO: 9617 - protein, 8 aa, Artificial sequence
  Synthetic antibody
GFTFSSYA

SEQ ID NO: 9618 - protein, 8 aa, Artificial sequence
  Synthetic antibody
ISYDGSNK

SEQ ID NO: 9619 - protein, 14 aa, Artificial sequence
  Synthetic antibody
ARGKLGIVGDAFDI

SEQ ID NO: 9620 - protein, 8 aa, Artificial sequence
  Synthetic antibody
GDSIYGYY

SEQ ID NO: 9621 - protein, 7 aa, Artificial sequence
  Synthetic antibody
VYHSGST

SEQ ID NO: 9622 - protein, 12 aa, Artificial sequence
  Synthetic antibody
ARGLAGGGYFDA

SEQ ID NO: 9623 - protein, 8 aa, Artificial sequence
  Synthetic antibody
GDTFSTYA

SEQ ID NO: 9624 - protein, 8 aa, Artificial sequence
  Synthetic antibody
IIPGLDLV

SEQ ID NO: 9625 - protein, 20 aa, Artificial sequence
  Synthetic antibody
ARGRRYDFLDGQYTSWYFDI

SEQ ID NO: 9626 - protein, 8 aa, Artificial sequence
  Synthetic antibody
GYTFTDYY

SEQ ID NO: 9627 - protein, 8 aa, Artificial sequence
  Synthetic antibody
VDPEDGET

SEQ ID NO: 9628 - protein, 15 aa, Artificial sequence
  Synthetic antibody
ATVSRWYYYYYGMDV

SEQ ID NO: 9629 - protein, 8 aa, Artificial sequence
  Synthetic antibody
GFNLSNYA

SEQ ID NO: 9630 - protein, 8 aa, Artificial sequence
  Synthetic antibody
ISYDGSIK

SEQ ID NO: 9631 - protein, 13 aa, Artificial sequence
  Synthetic antibody
VRGGVSGPNSFDM

SEQ ID NO: 9632 - protein, 8 aa, Artificial sequence
  Synthetic antibody
GFVFSDYS

SEQ ID NO: 9633 - protein, 8 aa, Artificial sequence
  Synthetic antibody
VGVDAVTK

SEQ ID NO: 9634 - protein, 18 aa, Artificial sequence
  Synthetic antibody
AKSQPVSRMGRFFVGLDV

SEQ ID NO: 9635 - protein, 8 aa, Artificial sequence
  Synthetic antibody
GFTFISYT

SEQ ID NO: 9636 - protein, 8 aa, Artificial sequence
  Synthetic antibody
ISYDGYNK

SEQ ID NO: 9637 - protein, 11 aa, Artificial sequence
  Synthetic antibody
AREGSPEAFDY

SEQ ID NO: 9638 - protein, 8 aa, Artificial sequence
  Synthetic antibody
GFTFSDYY

SEQ ID NO: 9639 - protein, 8 aa, Artificial sequence
  Synthetic antibody
IKPDGTGT

SEQ ID NO: 9640 - protein, 10 aa, Artificial sequence
  Synthetic antibody
VAYNWNYDFC

SEQ ID NO: 9641 - protein, 8 aa, Artificial sequence
  Synthetic antibody
GFSYSNYW

SEQ ID NO: 9642 - protein, 8 aa, Artificial sequence
  Synthetic antibody
LRRDGSVE

SEQ ID NO: 9643 - protein, 18 aa, Artificial sequence
  Synthetic antibody
ARDLSPGGLGAYYDVFDI

SEQ ID NO: 9644 - protein, 8 aa, Artificial sequence
  Synthetic antibody
GFVFSDYS

SEQ ID NO: 9645 - protein, 8 aa, Artificial sequence
  Synthetic antibody
VGVDAVTK

SEQ ID NO: 9646 - protein, 18 aa, Artificial sequence
  Synthetic antibody
AKSQPVSRMGRFFVGLDV

SEQ ID NO: 9647 - protein, 8 aa, Artificial sequence
  Synthetic antibody
GFTFSSYA

SEQ ID NO: 9648 - protein, 8 aa, Artificial sequence
  Synthetic antibody
ISGSGGST

SEQ ID NO: 9649 - protein, 15 aa, Artificial sequence
  Synthetic antibody
AKDQHMVRGAIGFDY

SEQ ID NO: 9650 - protein, 8 aa, Artificial sequence
  Synthetic antibody
GFIFSNFW

SEQ ID NO: 9651 - protein, 8 aa, Artificial sequence
  Synthetic antibody
IQQDGSEK

SEQ ID NO: 9652 - protein, 13 aa, Artificial sequence
  Synthetic antibody
ARQHGDYDWYFDY

SEQ ID NO: 9653 - protein, 8 aa, Artificial sequence
  Synthetic antibody
GFVFSDYS

SEQ ID NO: 9654 - protein, 8 aa, Artificial sequence
  Synthetic antibody
VGVDAVTK

SEQ ID NO: 9655 - protein, 18 aa, Artificial sequence
  Synthetic antibody
AKSQPVSRMGRFFVGLDV

SEQ ID NO: 9656 - protein, 8 aa, Artificial sequence
  Synthetic antibody
GFTFSNYA

SEQ ID NO: 9657 - protein, 8 aa, Artificial sequence
  Synthetic antibody
ISYDGTIT

SEQ ID NO: 9658 - protein, 11 aa, Artificial sequence
  Synthetic antibody
GRDLSGGGLDV

SEQ ID NO: 9659 - protein, 8 aa, Artificial sequence
  Synthetic antibody
GFTFSIYA

SEQ ID NO: 9660 - protein, 8 aa, Artificial sequence
  Synthetic antibody
ISYDGNNQ

SEQ ID NO: 9661 - protein, 14 aa, Artificial sequence
  Synthetic antibody
ARSEGGGYHDAFDI

SEQ ID NO: 9662 - protein, 8 aa, Artificial sequence
  Synthetic antibody
GFTFISYT

SEQ ID NO: 9663 - protein, 8 aa, Artificial sequence
  Synthetic antibody
ISYDGYNK

SEQ ID NO: 9664 - protein, 11 aa, Artificial sequence
  Synthetic antibody
AREGSPEAFDY

SEQ ID NO: 9665 - protein, 8 aa, Artificial sequence
  Synthetic antibody
GFTFSSYA

SEQ ID NO: 9666 - protein, 8 aa, Artificial sequence
  Synthetic antibody
ISGGGETT

SEQ ID NO: 9667 - protein, 17 aa, Artificial sequence
  Synthetic antibody
AKSPDATFLWFGEPFGY

SEQ ID NO: 9668 - protein, 8 aa, Artificial sequence
  Synthetic antibody
GDTFSTYA

SEQ ID NO: 9669 - protein, 8 aa, Artificial sequence
  Synthetic antibody
IIPGLDLV

SEQ ID NO: 9670 - protein, 20 aa, Artificial sequence
  Synthetic antibody
ARGRRYDFLDGQYTSWYFDI

SEQ ID NO: 9671 - protein, 8 aa, Artificial sequence
  Synthetic antibody
GFIFSNFW

SEQ ID NO: 9672 - protein, 8 aa, Artificial sequence
  Synthetic antibody
IQQDGSEK

SEQ ID NO: 9673 - protein, 13 aa, Artificial sequence
  Synthetic antibody
ARQHGDYDWYFDY

SEQ ID NO: 9674 - protein, 8 aa, Artificial sequence
  Synthetic antibody
GLTIRNYW

SEQ ID NO: 9675 - protein, 8 aa, Artificial sequence
  Synthetic antibody
MEEDGSEK

SEQ ID NO: 9676 - protein, 10 aa, Artificial sequence
  Synthetic antibody
TRDPGPGDFS

SEQ ID NO: 9677 - protein, 6 aa, Artificial sequence
  Synthetic antibody
QDINNY

SEQ ID NO: 9678 - protein, 3 aa, Artificial sequence
  Synthetic antibody
SAS

SEQ ID NO: 9679 - protein, 9 aa, Artificial sequence
  Synthetic antibody
QQYRSYPRT

SEQ ID NO: 9680 - protein, 6 aa, Artificial sequence
  Synthetic antibody
ALPKQN

SEQ ID NO: 9681 - protein, 3 aa, Artificial sequence
  Synthetic antibody
KDS

SEQ ID NO: 9682 - protein, 11 aa, Artificial sequence
  Synthetic antibody
QSADSSGTYVV

SEQ ID NO: 9683 - protein, 6 aa, Artificial sequence
  Synthetic antibody
ALPKQN

SEQ ID NO: 9684 - protein, 3 aa, Artificial sequence
  Synthetic antibody
KDS

SEQ ID NO: 9685 - protein, 11 aa, Artificial sequence
  Synthetic antibody
QSADSSGTYVV

SEQ ID NO: 9686 - protein, 6 aa, Artificial sequence
  Synthetic antibody
QDINNY

SEQ ID NO: 9687 - protein, 3 aa, Artificial sequence
  Synthetic antibody
SAS

SEQ ID NO: 9688 - protein, 9 aa, Artificial sequence
  Synthetic antibody
QQYRSYPRT

SEQ ID NO: 9689 - protein, 7 aa, Artificial sequence
  Synthetic antibody
ESVSSNY

SEQ ID NO: 9690 - protein, 3 aa, Artificial sequence
  Synthetic antibody
DAS

SEQ ID NO: 9691 - protein, 9 aa, Artificial sequence
  Synthetic antibody
QQYARAPDT

SEQ ID NO: 9692 - protein, 9 aa, Artificial sequence
  Synthetic antibody
SGSVSTSYY

SEQ ID NO: 9693 - protein, 3 aa, Artificial sequence
  Synthetic antibody
STN

SEQ ID NO: 9694 - protein, 10 aa, Artificial sequence
  Synthetic antibody
VLYMGSGIWV

SEQ ID NO: 9695 - protein, 6 aa, Artificial sequence
  Synthetic antibody
ALPKQN

SEQ ID NO: 9696 - protein, 3 aa, Artificial sequence
  Synthetic antibody
KDS

SEQ ID NO: 9697 - protein, 11 aa, Artificial sequence
  Synthetic antibody
QSADSSGTYVV

SEQ ID NO: 9698 - protein, 11 aa, Artificial sequence
  Synthetic antibody
QSADSSGTYVV

SEQ ID NO: 9699 - protein, 3 aa, Artificial sequence
  Synthetic antibody
KDS

SEQ ID NO: 9700 - protein, 11 aa, Artificial sequence
  Synthetic antibody
QSADSSGTYVV

SEQ ID NO: 9701 - protein, 6 aa, Artificial sequence
  Synthetic antibody
QTVNNN

SEQ ID NO: 9702 - protein, 3 aa, Artificial sequence
  Synthetic antibody
GTS

SEQ ID NO: 9703 - protein, 10 aa, Artificial sequence
  Synthetic antibody
QQYYEWPPIT

SEQ ID NO: 9704 - protein, 12 aa, Artificial sequence
  Synthetic antibody
QSLLYSSNNRDY

SEQ ID NO: 9705 - protein, 3 aa, Artificial sequence
  Synthetic antibody
WAS

SEQ ID NO: 9706 - protein, 9 aa, Artificial sequence
  Synthetic antibody
QQYFSPPYT

SEQ ID NO: 9707 - protein, 6 aa, Artificial sequence
  Synthetic antibody
QSVTNY

SEQ ID NO: 9708 - protein, 3 aa, Artificial sequence
  Synthetic antibody
QTS

SEQ ID NO: 9709 - protein, 11 aa, Artificial sequence
  Synthetic antibody
QQRSHRPGGIT

SEQ ID NO: 9710 - protein, 6 aa, Artificial sequence
  Synthetic antibody
QDISNY

SEQ ID NO: 9711 - protein, 3 aa, Artificial sequence
  Synthetic antibody
DAS

SEQ ID NO: 9712 - protein, 9 aa, Artificial sequence
  Synthetic antibody
QQYDNLPLT

SEQ ID NO: 9713 - protein, 12 aa, Artificial sequence
  Synthetic antibody
QSLLYSSNNRDY

SEQ ID NO: 9714 - protein, 3 aa, Artificial sequence
  Synthetic antibody
WAS

SEQ ID NO: 9715 - protein, 9 aa, Artificial sequence
  Synthetic antibody
QQYFSPPYT

SEQ ID NO: 9716 - protein, 11 aa, Artificial sequence
  Synthetic antibody
QSLLHRNGYNI

SEQ ID NO: 9717 - protein, 3 aa, Artificial sequence
  Synthetic antibody
LGS

SEQ ID NO: 9718 - protein, 10 aa, Artificial sequence
  Synthetic antibody
MQGLQTPPYT

SEQ ID NO: 9719 - protein, 6 aa, Artificial sequence
  Synthetic antibody
QSITTY

SEQ ID NO: 9720 - protein, 3 aa, Artificial sequence
  Synthetic antibody
APS

SEQ ID NO: 9721 - protein, 9 aa, Artificial sequence
  Synthetic antibody
QQSYSSPFT

SEQ ID NO: 9722 - protein, 6 aa, Artificial sequence
  Synthetic antibody
QTVNNN

SEQ ID NO: 9723 - protein, 3 aa, Artificial sequence
  Synthetic antibody
GTS

SEQ ID NO: 9724 - protein, 10 aa, Artificial sequence
  Synthetic antibody
QQYYEWPPIT

SEQ ID NO: 9725 - protein, 6 aa, Artificial sequence
  Synthetic antibody
ALPKQN

SEQ ID NO: 9726 - protein, 3 aa, Artificial sequence
  Synthetic antibody
KDS

SEQ ID NO: 9727 - protein, 11 aa, Artificial sequence
  Synthetic antibody
QSADSSGTYVV

SEQ ID NO: 9728 - protein, 7 aa, Artificial sequence
  Synthetic antibody
QSVSSSY

SEQ ID NO: 9729 - protein, 3 aa, Artificial sequence
  Synthetic antibody
GTS

SEQ ID NO: 9730 - protein, 9 aa, Artificial sequence
  Synthetic antibody
QQYGNSPWT

SEQ ID NO: 9731 - protein, 6 aa, Artificial sequence
  Synthetic antibody
QSVSSY

SEQ ID NO: 9732 - protein, 3 aa, Artificial sequence
  Synthetic antibody
DAS

SEQ ID NO: 9733 - protein, 10 aa, Artificial sequence
  Synthetic antibody
QQRSSWQGIT

SEQ ID NO: 9734 - protein, 6 aa, Artificial sequence
  Synthetic antibody
QSVSSY

SEQ ID NO: 9735 - protein, 3 aa, Artificial sequence
  Synthetic antibody
DAS

SEQ ID NO: 9736 - protein, 10 aa, Artificial sequence
  Synthetic antibody
QQRSSWQGIT

SEQ ID NO: 9737 - protein, 6 aa, Artificial sequence
  Synthetic antibody
QSVSSY

SEQ ID NO: 9738 - protein, 3 aa, Artificial sequence
  Synthetic antibody
DAS

SEQ ID NO: 9739 - protein, 8 aa, Artificial sequence
  Synthetic antibody
QQYNHWRT

SEQ ID NO: 9740 - protein, 12 aa, Artificial sequence
  Synthetic antibody
QSLLYSSNNRDY

SEQ ID NO: 9741 - protein, 3 aa, Artificial sequence
  Synthetic antibody
WAS

SEQ ID NO: 9742 - protein, 9 aa, Artificial sequence
  Synthetic antibody
QQYFSPPYT

SEQ ID NO: 9743 - protein, 7 aa, Artificial sequence
  Synthetic antibody
ESVSSNY

SEQ ID NO: 9744 - protein, 3 aa, Artificial sequence
  Synthetic antibody
DAS

SEQ ID NO: 9745 - protein, 9 aa, Artificial sequence
  Synthetic antibody
QQYARAPDT

SEQ ID NO: 9746 - protein, 11 aa, Artificial sequence
  Synthetic antibody
QGLLHGDGKTY

SEQ ID NO: 9747 - protein, 3 aa, Artificial sequence
  Synthetic antibody
EVS

SEQ ID NO: 9748 - protein, 9 aa, Artificial sequence
  Synthetic antibody
MQSVHLPYT

SEQ ID NO: 9749 - protein, 6 aa, Artificial sequence
  Synthetic antibody
KLGEKY

SEQ ID NO: 9750 - protein, 3 aa, Artificial sequence
  Synthetic antibody
QDT

SEQ ID NO: 9751 - protein, 9 aa, Artificial sequence
  Synthetic antibody
QAWDYTTVI

SEQ ID NO: 9752 - protein, 7 aa, Artificial sequence
  Synthetic antibody
QSVSSSY

SEQ ID NO: 9753 - protein, 3 aa, Artificial sequence
  Synthetic antibody
GAS

SEQ ID NO: 9754 - protein, 8 aa, Artificial sequence
  Synthetic antibody
QQYGSSYT

SEQ ID NO: 9755 - protein, 6 aa, Artificial sequence
  Synthetic antibody
QSVSSY

SEQ ID NO: 9756 - protein, 3 aa, Artificial sequence
  Synthetic antibody
DAS

SEQ ID NO: 9757 - protein, 9 aa, Artificial sequence
  Synthetic antibody
QQYRSYPRT

SEQ ID NO: 9758 - protein, 6 aa, Artificial sequence
  Synthetic antibody
QSITTY

SEQ ID NO: 9759 - protein, 3 aa, Artificial sequence
  Synthetic antibody
APS

SEQ ID NO: 9760 - protein, 9 aa, Artificial sequence
  Synthetic antibody
QQSYSSPFT

SEQ ID NO: 9761 - protein, 11 aa, Artificial sequence
  Synthetic antibody
QSLLYGNGYNY

SEQ ID NO: 9762 - protein, 3 aa, Artificial sequence
  Synthetic antibody
LGS

SEQ ID NO: 9763 - protein, 9 aa, Artificial sequence
  Synthetic antibody
MQGQENPPT

SEQ ID NO: 9764 - protein, 6 aa, Artificial sequence
  Synthetic antibody
QSVSSN

SEQ ID NO: 9765 - protein, 3 aa, Artificial sequence
  Synthetic antibody
GAS

SEQ ID NO: 9766 - protein, 8 aa, Artificial sequence
  Synthetic antibody
QQYNNWRT

SEQ ID NO: 9767 - protein, 11 aa, Artificial sequence
  Synthetic antibody
SVLYSSINKNY

SEQ ID NO: 9768 - protein, 3 aa, Artificial sequence
  Synthetic antibody
WAS

SEQ ID NO: 9769 - protein, 9 aa, Artificial sequence
  Synthetic antibody
QQYYSTPYT

SEQ ID NO: 9770 - protein, 8 aa, Artificial sequence
  Synthetic antibody
SSNIGSNY

SEQ ID NO: 9771 - protein, 3 aa, Artificial sequence
  Synthetic antibody
RNY

SEQ ID NO: 9772 - protein, 11 aa, Artificial sequence
  Synthetic antibody
AVWDDSLSGWV

SEQ ID NO: 9773 - protein, 6 aa, Artificial sequence
  Synthetic antibody
QTVNNN

SEQ ID NO: 9774 - protein, 3 aa, Artificial sequence
  Synthetic antibody
GTS

SEQ ID NO: 9775 - protein, 10 aa, Artificial sequence
  Synthetic antibody
QQYYEWPPIT

SEQ ID NO: 9776 - protein, 11 aa, Artificial sequence
  Synthetic antibody
RSLLSRNGYNY

SEQ ID NO: 9777 - protein, 3 aa, Artificial sequence
  Synthetic antibody
LGS

SEQ ID NO: 9778 - protein, 9 aa, Artificial sequence
  Synthetic antibody
MQAMQAPLT

SEQ ID NO: 9779 - protein, 6 aa, Artificial sequence
  Synthetic antibody
ALPKQN

SEQ ID NO: 9780 - protein, 3 aa, Artificial sequence
  Synthetic antibody
KDS

SEQ ID NO: 9781 - protein, 11 aa, Artificial sequence
  Synthetic antibody
QSADSSGTYVV

SEQ ID NO: 9782 - protein, 6 aa, Artificial sequence
  Synthetic antibody
ALPKQN

SEQ ID NO: 9783 - protein, 3 aa, Artificial sequence
  Synthetic antibody
KDS

SEQ ID NO: 9784 - protein, 11 aa, Artificial sequence
  Synthetic antibody
QSADSSGTYVV

SEQ ID NO: 9785 - protein, 6 aa, Artificial sequence
  Synthetic antibody
ALPKQN

SEQ ID NO: 9786 - protein, 3 aa, Artificial sequence
  Synthetic antibody
KDS

SEQ ID NO: 9787 - protein, 11 aa, Artificial sequence
  Synthetic antibody
QSADSSGTYVV

SEQ ID NO: 9788 - protein, 7 aa, Artificial sequence
  Synthetic antibody
ESVSSNY

SEQ ID NO: 9789 - protein, 3 aa, Artificial sequence
  Synthetic antibody
DAS

SEQ ID NO: 9790 - protein, 9 aa, Artificial sequence
  Synthetic antibody
QQYARAPDT

SEQ ID NO: 9791 - protein, 12 aa, Artificial sequence
  Synthetic antibody
QSLLYSSNNRDY

SEQ ID NO: 9792 - protein, 3 aa, Artificial sequence
  Synthetic antibody
WAS

SEQ ID NO: 9793 - protein, 9 aa, Artificial sequence
  Synthetic antibody
QQYFSPPYT

SEQ ID NO: 9794 - protein, 6 aa, Artificial sequence
  Synthetic antibody
QSVSSN

SEQ ID NO: 9795 - protein, 3 aa, Artificial sequence
  Synthetic antibody
GAS

SEQ ID NO: 9796 - protein, 9 aa, Artificial sequence
  Synthetic antibody
QQYNNWRFT

SEQ ID NO: 9797 - protein, 12 aa, Artificial sequence
  Synthetic antibody
QSLLYSSNNRDY

SEQ ID NO: 9798 - protein, 3 aa, Artificial sequence
  Synthetic antibody
WAS

SEQ ID NO: 9799 - protein, 9 aa, Artificial sequence
  Synthetic antibody
QQYFSPPYT

SEQ ID NO: 9800 - protein, 8 aa, Artificial sequence
  Synthetic antibody
SSNIGNNY

SEQ ID NO: 9801 - protein, 3 aa, Artificial sequence
  Synthetic antibody
DNN

SEQ ID NO: 9802 - protein, 11 aa, Artificial sequence
  Synthetic antibody
GTWDSSLSAVL

SEQ ID NO: 9803 - protein, 6 aa, Artificial sequence
  Synthetic antibody
HDIGHN

SEQ ID NO: 9804 - protein, 3 aa, Artificial sequence
  Synthetic antibody
DVS

SEQ ID NO: 9805 - protein, 6 aa, Artificial sequence
  Synthetic antibody
QQYDSI

SEQ ID NO: 9806 - protein, 6 aa, Artificial sequence
  Synthetic antibody
QSITTY

SEQ ID NO: 9807 - protein, 3 aa, Artificial sequence
  Synthetic antibody
APS

SEQ ID NO: 9808 - protein, 9 aa, Artificial sequence
  Synthetic antibody
QQSYSSPFT

SEQ ID NO: 9809 - protein, 6 aa, Artificial sequence
  Synthetic antibody
ETISNF

SEQ ID NO: 9810 - protein, 3 aa, Artificial sequence
  Synthetic antibody
SAA

SEQ ID NO: 9811 - protein, 9 aa, Artificial sequence
  Synthetic antibody
QQSFNTPRT

SEQ ID NO: 9812 - protein, 7 aa, Artificial sequence
  Synthetic antibody
ESVSSNY

SEQ ID NO: 9813 - protein, 3 aa, Artificial sequence
  Synthetic antibody
DAS

SEQ ID NO: 9814 - protein, 9 aa, Artificial sequence
  Synthetic antibody
QQYARAPDT

SEQ ID NO: 9815 - protein, 6 aa, Artificial sequence
  Synthetic antibody
QSVYIN

SEQ ID NO: 9816 - protein, 3 aa, Artificial sequence
  Synthetic antibody
GAS

SEQ ID NO: 9817 - protein, 8 aa, Artificial sequence
  Synthetic antibody
QQYNHWRT

SEQ ID NO: 9818 - protein, 6 aa, Artificial sequence
  Synthetic antibody
PGINTY

SEQ ID NO: 9819 - protein, 3 aa, Artificial sequence
  Synthetic antibody
GAS

SEQ ID NO: 9820 - protein, 9 aa, Artificial sequence
  Synthetic antibody
QAYYVGLGT

SEQ ID NO: 9821 - protein, 6 aa, Artificial sequence
  Synthetic antibody
YRGSQT

SEQ ID NO: 9822 - protein, 3 aa, Artificial sequence
  Synthetic antibody
SDD

SEQ ID NO: 9823 - protein, 11 aa, Artificial sequence
  Synthetic antibody
QVWDPSSDQAL

SEQ ID NO: 9824 - protein, 6 aa, Artificial sequence
  Synthetic antibody
ALPKQN

SEQ ID NO: 9825 - protein, 3 aa, Artificial sequence
  Synthetic antibody
KDS

SEQ ID NO: 9826 - protein, 11 aa, Artificial sequence
  Synthetic antibody
QSADSSGTYVV

SEQ ID NO: 9827 - protein, 6 aa, Artificial sequence
  Synthetic antibody
QSITTY

SEQ ID NO: 9828 - protein, 3 aa, Artificial sequence
  Synthetic antibody
APS

SEQ ID NO: 9829 - protein, 9 aa, Artificial sequence
  Synthetic antibody
QQSYSSPFT

SEQ ID NO: 9830 - protein, 6 aa, Artificial sequence
  Synthetic antibody
ALPKQN

SEQ ID NO: 9831 - protein, 3 aa, Artificial sequence
  Synthetic antibody
KDS

SEQ ID NO: 9832 - protein, 11 aa, Artificial sequence
  Synthetic antibody
QSADSSGTYVV

SEQ ID NO: 9833 - protein, 8 aa, Artificial sequence
  Synthetic antibody
SSNIGNNY

SEQ ID NO: 9834 - protein, 3 aa, Artificial sequence
  Synthetic antibody
DNN

SEQ ID NO: 9835 - protein, 11 aa, Artificial sequence
  Synthetic antibody
GTWDNSLSAWV

SEQ ID NO: 9836 - protein, 6 aa, Artificial sequence
  Synthetic antibody
QSVSSY

SEQ ID NO: 9837 - protein, 3 aa, Artificial sequence
  Synthetic antibody
DAS

SEQ ID NO: 9838 - protein, 10 aa, Artificial sequence
  Synthetic antibody
QQRSSWQGIT

SEQ ID NO: 9839 - protein, 6 aa, Artificial sequence
  Synthetic antibody
QSVGGH

SEQ ID NO: 9840 - protein, 3 aa, Artificial sequence
  Synthetic antibody
AAS

SEQ ID NO: 9841 - protein, 9 aa, Artificial sequence
  Synthetic antibody
QQSRNSPAT

SEQ ID NO: 9842 - protein, 6 aa, Artificial sequence
  Synthetic antibody
QDISNY

SEQ ID NO: 9843 - protein, 3 aa, Artificial sequence
  Synthetic antibody
DAS

SEQ ID NO: 9844 - protein, 9 aa, Artificial sequence
  Synthetic antibody
QQYDNLPLT

SEQ ID NO: 9845 - protein, 6 aa, Artificial sequence
  Synthetic antibody
ALPKQN

SEQ ID NO: 9846 - protein, 3 aa, Artificial sequence
  Synthetic antibody
KDS

SEQ ID NO: 9847 - protein, 11 aa, Artificial sequence
  Synthetic antibody
QSADSSGTYVV

SEQ ID NO: 9848 - protein, 6 aa, Artificial sequence
  Synthetic antibody
QTVNNN

SEQ ID NO: 9849 - protein, 3 aa, Artificial sequence
  Synthetic antibody
GTS

SEQ ID NO: 9850 - protein, 10 aa, Artificial sequence
  Synthetic antibody
QQYYEWPPIT

SEQ ID NO: 9851 - protein, 7 aa, Artificial sequence
  Synthetic antibody
QSVSSSY

SEQ ID NO: 9852 - protein, 3 aa, Artificial sequence
  Synthetic antibody
GAS

SEQ ID NO: 9853 - protein, 8 aa, Artificial sequence
  Synthetic antibody
QQYGSSYT

SEQ ID NO: 9854 - protein, 11 aa, Artificial sequence
  Synthetic antibody
QSLVYSDGNTY

SEQ ID NO: 9855 - protein, 3 aa, Artificial sequence
  Synthetic antibody
QVS

SEQ ID NO: 9856 - protein, 9 aa, Artificial sequence
  Synthetic antibody
MQGTHWPVT

SEQ ID NO: 9857 - protein, 9 aa, Artificial sequence
  Synthetic antibody
SNDVGRYNY

SEQ ID NO: 9858 - protein, 3 aa, Artificial sequence
  Synthetic antibody
EVV

SEQ ID NO: 9859 - protein, 10 aa, Artificial sequence
  Synthetic antibody
SSYGGNNILL

SEQ ID NO: 9860 - protein, 6 aa, Artificial sequence
  Synthetic antibody
ALPKQN

SEQ ID NO: 9861 - protein, 3 aa, Artificial sequence
  Synthetic antibody
KDS

SEQ ID NO: 9862 - protein, 11 aa, Artificial sequence
  Synthetic antibody
QSADSSGTYVV

SEQ ID NO: 9863 - protein, 11 aa, Artificial sequence
  Synthetic antibody
QSLVYSDGNTY

SEQ ID NO: 9864 - protein, 3 aa, Artificial sequence
  Synthetic antibody
QVS

SEQ ID NO: 9865 - protein, 9 aa, Artificial sequence
  Synthetic antibody
MQGSYWPFT

SEQ ID NO: 9866 - protein, 6 aa, Artificial sequence
  Synthetic antibody
QGIGNE

SEQ ID NO: 9867 - protein, 3 aa, Artificial sequence
  Synthetic antibody
AGS

SEQ ID NO: 9868 - protein, 9 aa, Artificial sequence
  Synthetic antibody
LQDYAYPRT

SEQ ID NO: 9869 - protein, 7 aa, Artificial sequence
  Synthetic antibody
QSVSSSY

SEQ ID NO: 9870 - protein, 3 aa, Artificial sequence
  Synthetic antibody
GAS

SEQ ID NO: 9871 - protein, 8 aa, Artificial sequence
  Synthetic antibody
QQYGSSYT

SEQ ID NO: 9872 - protein, 6 aa, Artificial sequence
  Synthetic antibody
QSVSSN

SEQ ID NO: 9873 - protein, 3 aa, Artificial sequence
  Synthetic antibody
GAS

SEQ ID NO: 9874 - protein, 8 aa, Artificial sequence
  Synthetic antibody
QQYNNWRT

SEQ ID NO: 9875 - protein, 6 aa, Artificial sequence
  Synthetic antibody
QGINSW

SEQ ID NO: 9876 - protein, 3 aa, Artificial sequence
  Synthetic antibody
AAS

SEQ ID NO: 9877 - protein, 9 aa, Artificial sequence
  Synthetic antibody
QQAHSFPIT

SEQ ID NO: 9878 - protein, 6 aa, Artificial sequence
  Synthetic antibody
ALPKQN

SEQ ID NO: 9879 - protein, 3 aa, Artificial sequence
  Synthetic antibody
KDS

SEQ ID NO: 9880 - protein, 11 aa, Artificial sequence
  Synthetic antibody
QSADSSGTYVV

SEQ ID NO: 9881 - protein, 9 aa, Artificial sequence
  Synthetic antibody
SNDVGGHNY

SEQ ID NO: 9882 - protein, 3 aa, Artificial sequence
  Synthetic antibody
DVT

SEQ ID NO: 9883 - protein, 10 aa, Artificial sequence
  Synthetic antibody
CSYKSTYDYV

SEQ ID NO: 9884 - protein, 7 aa, Artificial sequence
  Synthetic antibody
SGHSSYA

SEQ ID NO: 9885 - protein, 7 aa, Artificial sequence
  Synthetic antibody
LNSDGSH

SEQ ID NO: 9886 - protein, 9 aa, Artificial sequence
  Synthetic antibody
QTWGTGIHV

SEQ ID NO: 9887 - protein, 6 aa, Artificial sequence
  Synthetic antibody
ALSKQF

SEQ ID NO: 9888 - protein, 3 aa, Artificial sequence
  Synthetic antibody
KDS

SEQ ID NO: 9889 - protein, 12 aa, Artificial sequence
  Synthetic antibody
QSAHSSGFYRVV

SEQ ID NO: 9890 - protein, 6 aa, Artificial sequence
  Synthetic antibody
QTVNNN

SEQ ID NO: 9891 - protein, 3 aa, Artificial sequence
  Synthetic antibody
GTS

SEQ ID NO: 9892 - protein, 10 aa, Artificial sequence
  Synthetic antibody
QQYYEWPPIT

SEQ ID NO: 9893 - protein, 12 aa, Artificial sequence
  Synthetic antibody
QSLLYSSNNRDY

SEQ ID NO: 9894 - protein, 3 aa, Artificial sequence
  Synthetic antibody
WAS

SEQ ID NO: 9895 - protein, 9 aa, Artificial sequence
  Synthetic antibody
QQYFSPPYT

SEQ ID NO: 9896 - protein, 7 aa, Artificial sequence
  Synthetic antibody
QSVSSSY

SEQ ID NO: 9897 - protein, 3 aa, Artificial sequence
  Synthetic antibody
GAS

SEQ ID NO: 9898 - protein, 8 aa, Artificial sequence
  Synthetic antibody
QQYGSSYT

SEQ ID NO: 9899 - protein, 6 aa, Artificial sequence
  Synthetic antibody
ALPKQN

SEQ ID NO: 9900 - protein, 3 aa, Artificial sequence
  Synthetic antibody
KDS

SEQ ID NO: 9901 - protein, 11 aa, Artificial sequence
  Synthetic antibody
QSADSSGTYVV

1. A method of detecting COVID-19 infection with SARS-CoV-2 in a subject comprising:
(a) contacting a sample from said subject with an antibody or antibody fragment having clone-paired heavy and light chain CDR sequences from Tables 3 and 4, respectively; and
(b) detecting SARS-CoV-2 in said sample by binding of said antibody or antibody fragment to a SARS-CoV-2 antigen in said sample.

2-12. (canceled)

13. A method of treating a subject infected with SARS-CoV-2 or reducing the likelihood of infection of a subject at risk of contracting SARS-CoV-2, comprising delivering to said subject an antibody or antibody fragment having clone-paired heavy and light chain CDR sequences from Tables 3 and 4, respectively.

14. The method of claim 13, the antibody or antibody fragment is encoded by clone-paired light and heavy chain variable sequences as set forth in Table 1.

15. The method of claim 13, wherein said antibody or antibody fragment is encoded by light and heavy chain variable sequences having at least 70%, 80%, 90% or 95% identity to clone-paired sequences from Table 1.

16. The method of claim 13, wherein said antibody or antibody fragment comprises light and heavy chain variable sequences according to clone-paired sequences from Table 2.

17. The method of claim 13, wherein said antibody or antibody fragment comprises light and heavy chain variable sequences having at least 70%, 80% or 90% identity to clone-paired sequences from Table 2.

18. The method of claim 13, wherein said antibody or antibody fragment comprises light and heavy chain variable sequences having at least 95% identity to clone-paired sequences from Table 2.

19. The method of claim 13, wherein the antibody fragment is a recombinant scFv (single chain fragment variable) antibody, Fab fragment, F(ab′)₂ fragment, or Fv fragment.

20. The method of claim 13, wherein said antibody is an IgG, or a recombinant IgG antibody or antibody fragment comprising an Fc portion mutated to alter (eliminate or enhance) FcR interactions, to increase half-life and/or increase therapeutic efficacy, such as a LALA, LALA PG, N297, GASD/ALIE, DHS, YTE or LS mutation or glycan modified to alter (eliminate or enhance) FcR interactions such as enzymatic or chemical addition or removal of glycans or expression in a cell line engineered with a defined glycosylating pattern.

21. The method of claim 13, wherein said antibody is a chimeric antibody or a bispecific antibody.

22. The method of claim 13, wherein said antibody or antibody fragment binds to a SARS-CoV-2 surface spike protein.

23. The method of claim 13, wherein said antibody or antibody fragment is administered prior to infection or after infection.

24. The method of claim 13, wherein said subject is of age 60 or older, is immunocompromised, or suffers from a respiratory and/or cardiovascular disorder.

25. The method of claim 13, wherein delivering comprises antibody or antibody fragment administration, or genetic delivery with an RNA or DNA sequence or vector encoding the antibody or antibody fragment.

26. A monoclonal antibody, wherein the antibody or antibody fragment is characterized by clone-paired heavy and light chain CDR sequences from Tables 3 and 4, respectively.

27-35. (canceled)

36. A hybridoma or engineered cell encoding an antibody or antibody fragment wherein the antibody or antibody fragment is characterized by clone-paired heavy and light chain CDR sequences from Tables 3 and 4, respectively.

37-46. (canceled)

47. A vaccine formulation comprising one or more antibodies or antibody fragments characterized by clone-paired heavy and light chain CDR sequences from Tables 3 and 4, respectively.

48-56. (canceled)

57. A vaccine formulation comprising one or more expression vectors encoding a first antibody or antibody fragment, wherein the antibody or antibody fragment is characterized by clone-paired heavy and light chain CDR sequences from Tables 3 and 4, respectively.

58-97. (canceled)

98. The method of claim 13, wherein the subject is of age 60 or older, is an immunocompromised, or is suffering from a respiratory and/or cardiovascular disorder.
